(19) United States
(12) Patent Application Publication
(10) Pub. No.: US 2017/0348415 A1
(43) Pub. Date: Dec. 7, 2017

(54) TOLEROGENIC COMPOSITIONS AND METHODS

(71) Applicant: Moderna Therapeutics, Inc., Cambridge, MA (US)

(72) Inventors: Stephen G. HOGE, Brookline, MA (US); Eric Yi-Chun HUANG, Boston, MA (US); Louis Saint Laurence O'DEA, Hingham, MA (US)

(21) Appl. No.: 15/508,221

(22) PCT Filed: Sep. 3, 2015
(86) PCT No.: PCT/US2015/048225

§ 371 Date: Mar. 2, 2017

Related U.S. Application Data
(60) Provisional application No. 62/045,131, filed on Sep. 3, 2014.

(51) Int. Cl. A61K 39/39; A61K 9/14; A61K 39/36; A61K 39/00; A61K 39/35; C07K 16/28; C07K 16/00

(52) U.S. Cl. CPC A61K 39/39; C07K 16/2875; A61K 9/14; C07K 16/2812; C07K 16/2809; C07K 16/00; C07K 16/2818; A61K 39/0008; A61K 39/001; A61K 39/35; A61K 39/36; A61K 2039/53; A61K 2039/545; A61K 2039/55511; A61K 2039/57; A61K 2039/577

(57) ABSTRACT

The invention relates to tolerogenic compositions and methods for the preparation, manufacture and therapeutic use thereof.

### REFERENCE TO RELATED APPLICATIONS

[0001] This application claims priority to U.S. Provisional Patent Application No. 62/045,131, filed Sep. 3, 2014, entitled Compositions and Methods for Tolerizing Cellular Systems, the contents of which is herein incorporated by reference in its entirety.

### REFERENCE TO SEQUENCE LISTING

[0002] The present application is being filed along with a Sequence Listing in electronic format. The Sequence Listing is provided as a file entitled M147PCTSEQLIST.txt, created on Sep. 3, 2015 which is 931,522 bytes in size. The information in the electronic format of the sequence listing is incorporated herein by reference in its entirety.

### FIELD OF THE INVENTION

[0003] The present invention is directed to compositions and methods for tolerizing cellular systems. Specifically, in one aspect, the invention relates to tolerogenic polynucleotides, e.g., tolerogenic modified RNA in combination with one or more antigens (which may be delivered as a tolerogenic polynucleotide) useful in tolerizing cell systems. The tolerogenic polynucleotides of the invention may encode peptides, polypeptides or multiple proteins. The tolerogenic polynucleotides or tolerogenic polypeptides, collectively tolerogenic molecules, of interest may be used in therapeutic, clinical and/or research settings.

### BACKGROUND OF THE INVENTION

[0004] Advances in the general understanding of immunomodulation have identified several drivers of tolerance and/or suppressors of adaptive immune responses. T-regulatory cells (Tregs) are critical suppressors of T effector cells and Tregs are now understood to be the critical balancers against autoimmunity and for modulating immune responses to avoid damage to self (Wing & Sagakuchi, Nat Immunol. 2010 January; 11(1):7-13).

[0005] Dendritic cells (DCs) and other antigen presenting cells (APCs) also play a critical role in presenting antigens to T cells, including Tregs. The context of these antigen presentations, including APC to T cell signaling through both cell contact (e.g., TCR/MHC2/co receptor) and non-contact (e.g., cytokines) mechanisms, can either promote tolerance or induce potent adaptive responses and high affinity T effector cell responses. These in turn can potentiate and lock in B-cell antibody responses (Watanabe et al, Autoimmunity, 1999, Vol. 31, No. 4, Pages 273-282; Luo, et al., PNAS, 2007; vol. 104; no. 8; 2821-2826).

[0006] Several mechanisms for natural modulation of the T reg vs. T effector balance towards a tolerant phenotype for self- and non-self-antigens have also been described, particularly the use of immunosuppressive cytokines, antigen presenting modulators, co-inhibitory factors and T regulatory cell epitopes (Tregitopes).

[0007] For example, several cytokines with potent anti-inflammatory profiles have been identified. These can drive polarity of the adaptive immune response towards tolerance, often through Tregs. In addition to classical examples like TGF-beta (Luo et al, PNAS, 2007, Vol. 104. No. 8, Pages 2821-2826), and IL-10 several novel families have been described including IL-12 and IL-37 (see reviews in Banchereau et al, Nature Immunology, 2012, Vol. 13, No. 10, Pages 925-931; Cheng et al, Journal of Biological Chemistry, 2011, Vol. 286, No. 20, Pages 18013-18025; Wing & Sakaguchi, Nature Immunology, 2010, Vol. 11, No. 1, Pages 7-13). In most, if not all, cases these cytokines act locally as non-contact signaling molecules between APCs and T cells or between T regs and T effector cells (T effectors).

[0008] Antigen presenting modifiers have also been identified. For example, SOCS1 mRNA can attenuate antigen presentation (Evel-Kabler et al, Journal of Clinical Investigation, 2006, Vol. 116, No. 1, Pages 90-100). Similarly several molecules have been identified that decrease MHC2 antigen presentation.

[0009] Several co-inhibitory molecules also exist which signal through contact as part of the T-cell receptor (TCR) synapse. These include ILT3, GITR, and CTLA4. ILT3 expression on monocytes and DCs has been associated with transplant acceptance in allografts (Chang et al, Nature Immunology, 2002, Vol. 3. No. 3, Pages 237-243) and delays onset of T1D in NOD-scid mice (Vlad et al, Diabetes, 2008, Vol. 57, Pages 1878-1886). See also Suciu-Foca et al, Journal of Immunology, 2007, Vol. 178, Pages 7432-7441.

[0010] T regulatory cell epitopes or Tregitopes, first identified bio-informatically as conserved epitopes on Fc regions of circulating IgG (Cousens et al, J Clin Immunol, 2012, Vol 33 Suppl 1, Pages S43-S49), have been the focus of a recent study showing some impact of co-administration of antigens and Tregs in models of autoimmune type 1 diabetes.

[0011] The importance of Tregs in tolerance cannot be understated, with several specific cytokines being identified to play a role in the process to date (e.g., IL-10, TGF-beta) see Hoffman et al, Molecular Therapy, 2011, Vol. 19, No. 7, Pages 1263-1272, for example. It is crucial to note that context matters in the sense of adaptive immune function and microenvironments. For example, hepatic gene transfer can be used to induce tolerance even to non-native (e.g., human in mouse/non-human primate/canine) proteins (LoDuca et al, Curr Gene Ther, 2009, vol. 9(2), Pages 104-114; Finn et al, Blood, 2010, Vol. 116, Pages 5842-5848). Similar findings have been observed in human trials of gene therapy where pharmacological immunomodulation, including cyclosporine A, rituximab, and high dose systemic steroids, can modulate or prevent development of neutralizing antibodies (NAbs). Mingozzi et al, Molecular Therapy, 2012, Vol. 20, No. 7, Pages 1410-1416.

[0012] The gene therapy field has also made significant advances over the last decade in addressing the problem of adaptive immune responses to transgenes, both self (tolerance breaking) and non-self (no native peptide). see High, Blood, 2012, Vol 120, Pages 4482-4487.

[0013] The specific administration locale or effective microenvironment also plays a strong role in positive outcomes and is the predominant reason that recombinant approaches are not as successful since expression is more widespread for such tolerogenic compositions. For example, systemically administered nanoparticles, including ionizable and cationic lipid nanoparticles, are usually taken up preferentially in the liver and by APCs as well as myeloid cells (DCs, monocytes) in the blood. It is envisioned that adjusting nanoparticle size and the addition of targeting epitopes can drive the preference towards APCs/DCs and away from hepatocytes. Furthermore, it is also envisioned that cell, tissue or organ specific targeting may enhance or improve tolerance. To this end, engineering microRNA binding sites into the 3′UTR of the transcript that destabilize the transcript in hepatocytes can also be used to further tune translation of the tolerogenic target towards DCs and the cells of the immune system (e.g., mir122 “knock down” in hepatocytes) and the specific antigen/transgene towards the target cells (e.g. mir142.3p “knock down” in lymphocytes).

[0014] The present invention addresses the present and long-felt need for tolerogenic compounds and/or compositions, including methods of using such compound and compositions, for the selective tuning of the adaptive immune system as interventions which expand Treg cells may offer novel treatment options in a variety of clinical settings. To this end, the present invention provides tolerogenic compositions including polynucleotides which may be used alone or in conjunction with other therapeutic modalities, including antigens, adjuvants and/or other polynucleotides (whether tolerizing or not), to alter or modulate tolerance in cellular systems. In this manner, the profile or signature of an immune system microenvironment may be fine tuned using the embodiments of the invention like a rheostat or regulator to accept or reject the presentation of one or more antigens, adjuvants or therapeutic modalities.

### SUMMARY OF THE INVENTION

[0015] Described herein are compositions, methods, processes, kits and devices for the design, preparation, manufacture and/or formulation of polynucleotides (whether protein coding or not) which fuction to alter the adapative immune response of a cell or cell systems to one or more antigens, adjuvants or therapeutic modalities or to change the innate immune profile or signature of a cell or cell system in response to contact with such antigen adjuvant or therapeutic modality. The compositions or formulations of the polynucleotides may comprise phosphatidylserine (PS).

[0016] Provided herein are methods of inducing tolerance in a cell system to an antigen comprising contacting a cellular system with a tolerogenic composition comprising phosphatidylserine (PS), the antigen and one or more polynucleotides which may encode a tolerogenic polypeptide of interest.

[0017] Also provided herein are methods of inducing Treg cell activity in a cellular system comprising contacting the cellular system with a tolerogenic composition comprising phosphatidylserine (PS), an antigen and one or more polynucleotides which may encode a tolerogenic polypeptide of interest.

[0018] In one embodiment, the one or more tolerogenic polynucleotides may comprise a chemically modified mRNA and/or may encode an immunomodulatory polypeptide. The immunomodulatory polypeptide may encode an inhibitor of mTOR, IL-2, an anti-IL-2 complex, IL-10, TGF-β, IL-35, galectin-1, IL-23, IL-27, IL-35, IL-37 or antibody such as, but not limited to, an antibody reactive to CD3, CD40, CD40 ligand, CD4, and CTLA-4. The antibody may be reactive with a member

[0019] The chemically modified mRNA may comprise at least one region which is codon optimized.

[0020] The tolerogenic compositions described herein may be formulated in any formulation described herein such as, but not limited to a lipid nanoparticle (LNP). The tolerogenic composition may comprise phosphatidylserine (PS).

[0021] The LNP formulation may be administered by the methods described herein including, but not limited to, systemically. The tolerogenic compositions described herein may include phosphatidylserine (PS).

[0022] The tolerogenic compositions described herein may be co-administered with phosphatidylserine (PS).

[0023] Provided herein is a method of treating an autoimmune disease (e.g., lupus), inflammatory disease (e.g., colitis, Crohn's disease, allergic encephalitis), allograft transplant/graft vs. host disease (GVHD), diabetes or multiple sclerosis, comprising contacting a cell, tissue or organism with a tolerogenic composition comprising an antigen and one or more polynucleotides encoding a tolerogenic polypeptide of interest.

[0024] Provided herein is a method of treating a subject with an environmental hypersensitivity or allergic reaction to a protein or antigen comprising contacting the subject with a tolerogenic composition described herein. The environmental hypersensitivity or allergic reaction may be to a protein, antigen or other trigger such as, but not limited to, plants, grass, tree and other plant pollens, mammal, animal hair or dander, insect, insect parts, excreta or venom, helminthes, non-mammals, birds and reptiles, foods (e.g., legumes, nuts and fish), bacteria, fungi and molds, drugs, metals, wool and latex.

[0025] The subject may be contacted using a micro-dosing regimen that occurs over a period of time such as, but not limited to, at least 1 hour, at least 2 hours, at least 3 hours, at least 4 hours, at least 5 hours, at least 6 hours, at least 7 hours, at least 8 hours, at least 9 hours, at least 10 hours, at least 11 hours, at least 12 hours, at least 13 hours, at least 14 hours, at least 15 hours, at least 16 hours, at least 17 hours, at least 18 hours, at least 19 hours, at least 20 hours, at least 21 hours, at least 22 hours, at least 23 hours, at least 1 day, at least 36 hours, at least 2 days, at least 3 days, at least 4 days, at least 5 days, at least 6 days, at least 1 week, at least 2 weeks, at least 3 weeks, at least 1 month, at least 2 months, at least 3 months, at least 4 months, at least 5 months, at least 6 months or more than 6 months. The amount of antigen and one or more polynucleotides in the tolerogenic composition may be increased during the micro-dosing regimen.

[0026] The details of various embodiments of the invention are set forth in the description below. Other features, objects, and advantages of the invention will be apparent from the description and the drawings, and from the appended claims.

### BRIEF DESCRIPTION OF THE DRAWINGS

[0027] The foregoing and other objects, features and advantages will be apparent from the following description of particular embodiments of the invention, as illustrated in the accompanying drawings in which like reference characters refer to the same parts throughout the different views. The drawings are not necessarily to scale, emphasis instead being placed upon illustrating the principles of various embodiments of the invention.

[0028] FIG. 1 comprises FIG. 1A and FIG. 1B showing a schematic of an IVT polynucleotide construct. FIG. 1A is a schematic of an IVT polynucleotide construct taught in commonly owned U.S. Pat. No. 8,999,380, the contents of which are incorporated herein by reference. FIG. 1B is a schematic of an IVT polynucleotide construct.

[0029] FIG. 2 is a schematic of a series of chimeric polynucleotides of the present invention. Such chimeric polynucleotides may function alone or in combination with another molecule as a polynucleotide encoding a tolerogenic polypeptide of interest.

[0030] FIG. 3 is a schematic of a series of chimeric polynucleotides illustrating various patterns of positional modifications and showing regions analogous to those regions of an mRNA polynucleotide. Such chimeric polynucleotides may function alone or in combination with another molecule as a polynucleotide encoding a tolerogenic polypeptide of interest.

[0031] FIG. 4 is a schematic of a series of chimeric polynucleotides illustrating various patterns of positional modifications based on Formula I. Such chimeric polynucleotides may function alone or in combination with another molecule as a polynucleotide encoding a tolerogenic polypeptide of interest.

[0032] FIG. 5 is a is a schematic of a series of chimeric polynucleotides illustrating various patterns of positional modifications based on Formula I and further illustrating a blocked or structured 3′ terminus. Such polynucleotides may function alone or in combination with another molecule as a polynucleotide encoding a tolerogenic polypeptide of interest.

### DETAILED DESCRIPTION OF THE INVENTION

[0033] The present invention provides compositions and methods for tolerizing cellular systems, in particular for the modulation of adaptive immunity using tolerogenic molecules (e.g., tolerogenic polynucleotides which may comprise modified RNA and/or mRNA constructs), including promoting tolerance for gene therapy, improving the ability to “repeat dose” one or more polynucleotides as a therapy, and treating autoimmune diseases such as lupus, inflammatory diseases such as colitis, Chron's disease, allergic encephalitis, and/or allograft transplant/graft vs. host disease (GVHD), diabetes or multiple sclerosis.

[0034] The combination of polynucleotides encoding tolerogenic signaling polypeptides and a delivery technology (e.g., lipid nanoparticles or LNPs) with a propensity for uptake in antigen presenting cells (APCs) provides a platform for driving tolerance to specific antigens or epitopes contained therein that may be co-administered to those APCs/dendritic cells (DCs). Some practical applications of the present invention include: (1) treatment of autoimmune disease, (2) creating or improving tolerance to gene therapy transgenes, (3) creating or improving tolerance to repeat modified mRNA therapy that is immunogenic, and (4) creating or improving tolerance to allografts/transplants of solid organs.

[0035] In one embodiment, a tolerogenic composition comprising at least one polynucleotide encoding a tolerogenic polypeptide may be used as a tolerance inducing therapeutic in transplant. The composition may comprise or may be co-administered with phosphatidylserine (PS). As a non-limiting example, harvested organs may be contacted with a tolerogenic composition through a single perfusion. As another non-limiting example, the transplant donor may be administered a tolerogenic composition comprising polynucleotides encoding tolerogenic polypeptides of interest such as tolerogenic signals based on the donor HLA haplotype to the transplant recipient.

[0036] In one embodiment, a tolerogenic composition comprising at least one polynucleotide encoding a tolerogenic polypeptide may be used to treat and/or prevent autoimmunity. “Autoimmunity” is the failure of an organism in recognizing its own constituent parts as self, thus leading to an immune response against its own cells and tissues. Autoimmunity is an immune response to foreign antigens (alloantigens) from members of the same species. Diseases that result from the aberrant immune response are referred to as “autoimmune diseases” where an organism loses the ability to ignore “self” and react to “non-self.”

[0037] In one embodiment, co-administration of a tolerogenic composition comprising at least one polynucleotide encoding a tolerogenic polypeptide may be used to induce tolerance and to create recipient Tregs for key donor antigens.

[0038] In another embodiment, a tolerogenic composition comprising at least one polynucleotide encoding a tolerogenic polypeptide may be used in allogenic bone marrow transplantation (BMT) to instruct tolerance for the allografted immune system in order to reduce or eliminate graft versus host disease (GVHD).

[0039] In another embodiment, a tolerogenic composition comprising at least one polynucleotide encoding a tolerogenic polypeptide may be used in a formulation with phosphatidyserine in allogenic bone marrow transplantation (BMT) to further enhance tolerance for the allografted immune system in order to reduce or eliminate GVHD, by inhibiting maturation and antigen presentation of dendritic cells.

[0040] Described herein are compositions (including pharmaceutical compositions) and methods for the design, preparation, manufacture and/or formulation of polynucleotides, specifically IVT polynucleotides, chimeric polynucleotides and/or circular polynucleotides encoding at least one tolerogenic molecule and/or fragment thereof.

[0041] In some embodiments, the polynucleotides are administered in combination with one or more antigens, adjuvants or other molecule (including other tolerogenic polynucleotides) in tolerogenic compositions.

[0042] Also provided are systems, processes, devices and kits for the selection, design and/or utilization of the polynucleotides described herein.

[0043] According to the present invention, the polynucleotides are preferably modified in a manner as to avoid the deficiencies of other molecules of the art. Consequently, provided herein, therefore, are polynucleotides (also referred to as polynucleotides, irrespective of whether they are synthesized via IVT or chimeric means or whether they are linear or circular) which improve one or more of the stability and/or clearance in tissues, receptor uptake and/or kinetics, cellular access, engagement with translational machinery, mRNA half-life, translation efficiency, immune evasion, protein production capacity, secretion efficiency (when applicable), accessibility to circulation, protein half-life and/or modulation of a cell's status, function and/or activity while also functioning to modulate or alter at least one adaptive immune response of a cell or cell system.

[0044] Polynucleotides of the present invention may be administered alone or in combination with other polynucleotides encoding tolerogenic polypeptides of interest (of any type) or with other molecules to alter self or non-self responsiveness of cells or cellular systems. To this end, a first polynucleotide encoding a tolerogenic polypeptide of interest may alter the adaptive immune response to itself, its encoded polypeptide or to another distinct polynucleotide encoding a tolerogenic polypeptide of interest or the polypeptide encoded therein.

[0045] In one embodiment, provided herein are tolerogenic compositions comprising at least one antigen, adjuvant or other molecule and at least one polynucleotide encoding a tolerogenic polypeptide of interest.

[0046] In one embodiment, at least one polynucleotide encoding a tolerogenic polypeptide of interest may be formulated in a tolerogenic composition with at least one antigen, adjuvant or other molecule. The tolerogenic composition may be delivered to a cell, tissue or subject alone or in combination with other polynucleotides, adjuvants, antigens and/or other molecules.

[0047] In one embodiment, at least one polynucleotide encoding a tolerogenic polypeptide of interest may be co-administered in a tolerogenic composition with at least one antigen, adjuvant or other molecule. The polynucleotide and the antigen, adjuvant or other molecule may be formulated in the same tolerogenic composition or in distinct tolerogenic compositions. As a non-limiting example, the polynucleotide encoding a tolerogenic polypeptide of interest may be formulated in a tolerogenic composition which may also comprise at least one antigen, adjuvant or other molecule. As another non-limiting example, the polynucleotide encoding a tolerogenic polypeptide of interest may be formulated in a first tolerogenic composition and the antigen, adjuvant or other molecule may be formulated in a second tolerogenic composition. The first and second composition may be co-administered to a cell, tissue or organism.

[0048] As used herein, “co-administered” means the administration of two or more components. These components for co-administration include, but are not limited to adjuvants, antigens, active ingredients, polynucleotides, amino acids, inactive ingredients and excipients. Co-administration refers to the administration of two or more components simultaneously or with a time lapse between administration such as 1 second, 5 seconds, 10 seconds, 15 seconds, 30 seconds, 45 seconds, 1 minute, 2 minutes, 3 minutes, 4 minutes, 5 minutes, 6 minutes, 7 minutes, 8 minutes, 9 minutes, 10 minutes, 11 minutes, 12 minutes, 13 minutes, 14 minutes, 15 minutes, 16 minutes, 17 minutes, 18 minutes, 19 minutes, 20 minutes, 21 minutes, 22 minutes, 23 minutes, 24 minutes, 25 minutes, 26 minutes, 27 minutes, 28 minutes, 29 minutes, 30 minutes, 31 minutes, 32 minutes, 33 minutes, 34 minutes, 35 minutes, 36 minutes, 37 minutes, 38 minutes, 39 minutes, 40 minutes, 41 minutes, 42 minutes, 43 minutes, 44 minutes, 45 minutes, 46 minutes, 47 minutes, 48 minutes, 49 minutes, 50 minutes, 51 minutes, 52 minutes, 53 minutes, 54 minutes, 55 minutes, 56 minutes, 57 minutes, 58 minutes, 59 minutes, 1 hour, 1.5 hours, 2 hours, 2.5 hours, 3 hours, 4 hours, 5 hours, 6 hours, 7 hours, 8 hours, 9 hours, 10 hours, 11 hours, 12 hours, 13 hours, 14 hours, 15 hours, 16 hours, 17 hours, 18 hours, 19 hours, 20 hours, 21 hours, 22 hours, 23 hours, 1 day, 1.5 days, 2 days, or more than 3 days.

[0049] It is further appreciated that certain features of the present disclosure, which are, for clarity, described in the context of separate embodiments, can also be provided in combination in a single embodiment. Conversely, various features of the present disclosure which are, for brevity, described in the context of a single embodiment, can also be provided separately or in any suitable subcombination.

### I. Compositions of the Invention

### Polynucleotides

[0050] The present invention provides nucleic acid molecules, specifically polynucleotides which, in some embodiments, encode one or more peptides or polypeptides of interest such as, but not limited to, the tolerogenic polypeptides taught herein. The term “nucleic acid,” in its broadest sense, includes any compound and/or substance that comprise a polymer of nucleotides. These polymers are often referred to as polynucleotides. When referring to polynucleotides of the invention, it should be understood that the term “polynucleotides” broadly embraces the polynucleotides encoding tolerogenic polypeptides of interest regardless of their method of synthesis (e.g., IVT or chemically synthesized or combinations thereof); structure, (e.g., linear or circular or combinations thereof); or coding capacity (e.g., protein coding or non-coding).

[0051] The polynucleotides of the present invention function to promote tolerance in cells or cellular systems, whether to self or non-self antigens. As used herein, the term “tolerance” when referring to cells or cellular systems means an antigen-specific nonresponsiveness to a challenge, where the “antigen” comprises a polynucleotide of the present invention. By non-responsiveness” it is meant that administration or contact with a specific antigen produces at least 10%, at least 20%, at least 30%, at least 40%, at least 50%, at least 60%, at least 70%, at least 80%, at least 90%, at least 95%, at least 99% or 100% reduction in responsiveness as compared to the cell or cellular response in the absence of the polynucleotide encoding a tolerogenic polypeptide of interest or the tolerogenic polypeptide. Therefore, the tolerogenic molecules of the present invention may be referred to, or considered, antigens.

[0052] Such antigen challenges may be delivered with or without an adjuvant. Adjuvants may be strong adjuvants or weak adjuvants. As used herein, the term “tolerogenic” in reference to a polynucleotide or polypeptide refers to a molecule which functions to induce, promote, or improve tolerance. Such induction, promotion or improvement may be via the modulation of the balance between Tregs and T effector cells. A polynucleotide of the invention may encode a tolerogenic polypeptide or it may encode a noncoding tolerogenic polynucleotide.

[0053] Exemplary nucleic acids or polynucleotides of the invention include, but are not limited to, ribonucleic acids (RNAs), deoxyribonucleic acids (DNAs), threose nucleic acids (TNAs), glycol nucleic acids (GNAs), peptide nucleic acids (PNAs), locked nucleic acids (LNAs, including LNA having a β-D-ribo configuration, α-LNA having an α-L-ribo configuration (a diastereomer of LNA), 2′-amino-LNA having a 2′-amino functionalization, and 2′-amino-α-LNA having a 2′-amino functionalization), ethylene nucleic acids (ENA), cyclohexenyl nucleic acids (CeNA) or hybrids or combinations thereof.

[0054] In one embodiment, linear polynucleotides of the present invention which are made using only in vitro transcription (IVT) enzymatic synthesis methods are referred to as “IVT polynucleotides.” Methods of making IVT polynucleotides are known in the art and are described in co-pending International Publication Nos. WO2013151666, WO2013151667, WO2013151668, WO2013151663, WO2013151669, WO2013151670, WO2013151664, WO2013151665, WO2013151736, WO2013151671 and WO2013151672, and in some embodiments, the antigen-specific response that is to be altered arises from a challenge to the cell or cellular system by any one of the polynucleotides or polypeptides taught therein, the contents of each of which are herein incorporated by reference in their entireties.

[0055] In another embodiment, the polynucleotides of the present invention which have portions or regions which differ in size and/or chemical modification pattern, chemical modification position, chemical modification percent or chemical modification population and combinations of the foregoing are known as “chimeric polynucleotides.” A “chimera” according to the present invention is an entity having two or more incongruous or heterogeneous parts or regions. As used herein a “part” or “region” of a polynucleotide is defined as any portion of the polynucleotide which is less than the entire length of the polynucleotide.

[0056] In yet another embodiment, the polynucleotides of the present invention that are circular are known as “circular polynucleotides” or “circP.” As used herein, “circular polynucleotides” or “circP” means a single stranded circular polynucleotide which acts substantially like, and has the properties of, an RNA. The term “circular” is also meant to encompass any secondary or tertiary configuration of the circP.

[0057] In some embodiments, the polynucleotide includes from about 30 to about 100,000 nucleotides (e.g., from 30 to 50, from 30 to 100, from 30 to 250, from 30 to 500, from 30 to 1,000, from 30 to 1,500, from 30 to 3,000, from 30 to 5,000, from 30 to 7,000, from 30 to 10,000, from 30 to 25,000, from 30 to 50,000, from 30 to 70,000, from 100 to 250, from 100 to 500, from 100 to 1,000, from 100 to 1,500, from 100 to 3,000, from 100 to 5,000, from 100 to 7,000, from 100 to 10,000, from 100 to 25,000, from 100 to 50,000, from 100 to 70,000, from 100 to 100,000, from 500 to 1,000, from 500 to 1,500, from 500 to 2,000, from 500 to 3,000, from 500 to 5,000, from 500 to 7,000, from 500 to 10,000, from 500 to 25,000, from 500 to 50,000, from 500 to 70,000, from 500 to 100,000, from 1,000 to 1,500, from 1,000 to 2,000, from 1,000 to 3,000, from 1,000 to 5,000, from 1,000 to 7,000, from 1,000 to 10,000, from 1,000 to 25,000, from 1,000 to 50,000, from 1,000 to 70,000, from 1,000 to 100,000, from 1,500 to 3,000, from 1,500 to 5,000, from 1,500 to 7,000, from 1,500 to 10,000, from 1,500 to 25,000, from 1,500 to 50,000, from 1,500 to 70,000, from 1,500 to 100,000, from 2,000 to 3,000, from 2,000 to 5,000, from 2,000 to 7,000, from 2,000 to 10,000, from 2,000 to 25,000, from 2,000 to 50,000, from 2,000 to 70,000, and from 2,000 to 100,000).

[0058] In one embodiment, the polynucleotides of the present invention may encode at least one peptide or polypeptide of interest. In another embodiment, the polynucleotides of the present invention may be non-coding.

[0059] In one embodiment, the length of a region encoding at least one peptide polypeptide of interest of the polynucleotides present invention is greater than about 30 nucleotides in length (e.g., at least or greater than about 35, 40, 45, 50, 55, 60, 70, 80, 90, 100, 120, 140, 160, 180, 200, 250, 300, 350, 400, 450, 500, 600, 700, 800, 900, 1,000, 1,100, 1,200, 1,300, 1,400, 1,500, 1,600, 1,700, 1,800, 1,900, 2,000, 2,500, and 3,000, 4,000, 5,000, 6,000, 7,000, 8,000, 9,000, 10,000, 20,000, 30,000, 40,000, 50,000, 60,000, 70,000, 80,000, 90,000 or up to and including 100,000 nucleotides). As used herein, such a region may be referred to as a “coding region” or “region encoding.”

[0060] In one embodiment, the polynucleotides of the present invention is or functions as a messenger RNA (mRNA). As used herein, the term “messenger RNA” (mRNA) refers to any polynucleotide which encodes at least one peptide or polypeptide of interest and which is capable of being translated to produce the encoded peptide polypeptide of interest in vitro, in vivo, in situ or ex vivo.

[0061] In one embodiment, the polynucleotides of the present invention may be structurally modified or chemically modified. As used herein, a “structural” modification is one in which two or more linked nucleosides are inserted, deleted, duplicated, inverted or randomized in a polynucleotide without significant chemical modification to the nucleotides themselves. Because chemical bonds will necessarily be broken and reformed to effect a structural modification, structural modifications are of a chemical nature and hence are chemical modifications. However, structural modifications will result in a different sequence of nucleotides. For example, the polynucleotide “ATCG” may be chemically modified to “AT-5meC-G”. The same polynucleotide may be structurally modified from “ATCG” to “ATCCCG”. Here, the dinucleotide “CC” has been inserted, resulting in a structural modification to the polynucleotide.

[0062] In one embodiment, the polynucleotides of the present invention, such as IVT polynucleotides or circular polynucleotides, may have a uniform chemical modification of all or any of the same nucleoside type or a population of modifications produced by mere downward titration of the same starting modification in all or any of the same nucleoside type, or a measured percent of a chemical modification of all any of the same nucleoside type but with random incorporation, such as where all uridines are replaced by a uridine analog, e.g., pseudouridine. In another embodiment, the polynucleotides may have a uniform chemical modification of two, three, or four of the same nucleoside type throughout the entire polynucleotide (such as all uridines and all cytosines, etc. are modified in the same way).

[0063] When the polynucleotides of the present invention are chemically and/or structurally modified the polynucleotides may be referred to as “modified polynucleotides.”

[0064] In one embodiment, the polynucleotides of the present invention may include a sequence encoding a self-cleaving peptide. The self-cleaving peptide may be, but is not limited to, a 2A peptide. As a non-limiting example, the 2A peptide may have the protein sequence: GSGATNFSLLKQAGDVEENPGP (SEQ ID NO: 1), fragments or variants thereof. In one embodiment, the 2A peptide cleaves between the last glycine and last proline. As another non-limiting example, the polynucleotides of the present invention may include a polynucleotide sequence encoding the 2A peptide having the protein sequence GSGATNFSLLKQAGDVEENPGP (SEQ ID NO: 1) fragments or variants thereof.

[0065] One such polynucleotide sequence encoding the 2A peptide is GGAAGCGGAGCTACTAACTTCAGCCTGCTGAAGCAGGCTGGAGACGTGGAG GAGAACCCTGGACCT (SEQ ID NO: 2). The polynucleotide sequence of the 2A peptide may be modified or codon optimized by the methods described herein and/or are known in the art.

[0066] In one embodiment, this sequence may be used to separate the coding region of two or more polypeptides of interest. As a non-limiting example, the sequence encoding the 2A peptide may be between a first coding region A and a second coding region B (A-2Apep-B). The presence of the 2A peptide would result in the cleavage of one long protein into protein A, protein B and the 2A peptide. Protein A and protein B may be the same or different peptides or polypeptides of interest. In another embodiment, the 2A peptide may be used in the polynucleotides of the present invention to produce two, three, four, five, six, seven, eight, nine, ten or more proteins.

### IVT Polynucleotide Architecture

[0067] Traditionally, the basic components of an mRNA molecule include at least a coding region, a 5′UTR, a 3′UTR, a 5′ cap and a poly-A tail. The IVT polynucleotides of the present invention may function as mRNA but are distinguished from wild-type mRNA in their functional and/or structural design features which serve to overcome existing problems of effective polypeptide production using nucleic-acid based therapeutics.

[0068] FIG. 1 shows a primary construct 100 of an IVT polynucleotide of the present invention. As used herein, “primary construct” refers to a polynucleotide of the present invention which encodes one or more polypeptides of interest and which retains sufficient structural and/or chemical features to allow the polypeptide of interest encoded therein to be translated.

[0069] According to FIGS. 1A and 1B, the primary construct 100 of an IVT polynucleotide here contains a first region of linked nucleotides 102 that is flanked by a first flanking region 104 and a second flaking region 106. The first flanking region 104 may include a sequence of linked nucleosides which function as a 5′ untranslated region (UTR) such as the 5′ UTR of any of the nucleic acids encoding the native 5′UTR of the polypeptide or a non-native 5′UTR such as, but not limited to, a heterologous 5′UTR or a synthetic 5′UTR. The polypeptide of interest may comprise at its 5′ terminus one or more signal sequences encoded by a signal sequence region 103. The flanking region 104 may comprise a region of linked nucleotides comprising one or more complete or incomplete 5′ UTRs sequences which may be completely codon optimized or partially codon optimized. The flanking region 104 may include at least one nucleic acid sequence including, but not limited to, miR sequences, TERZAK™ sequences and translation control sequences. The flanking region 104 may also comprise a 5′ terminal cap 108. The 5′ terminal capping region 108 may include a naturally occurring cap, a synthetic cap or an optimized cap. Non-limiting examples of optimized caps include the caps taught by Rhoads in U.S. Pat. No. 7,074,596 and International Patent Publication No. WO2008157668, WO2009149253 and WO2013103659, the contents of each of which are herein incorporated by reference in its entirety. The second flanking region 106 may comprise a region of linked nucleotides comprising one or more complete or incomplete 3′ UTRs which may encode the native 3′ UTR of the polypeptide or a non-native 3′UTR such as, but not limited to, a heterologous 3′UTR or a synthetic 3′ UTR. The second flanking region 106 may be completely codon optimized or partially codon optimized. The flanking region 106 may include at least one nucleic acid sequence including, but not limited to, miR sequences and translation control sequences. The flanking region 106 may also comprise a 3′ tailing sequence 110. The 3′ tailing sequence 110 may include a synthetic tailing region 112 and/or a chain terminating nucleoside 114. Non-liming examples of a synthetic tailing region include a polyA tail, a polyC tail, a polyA-G quartet and/or a stem loop sequence. Non-limiting examples of chain terminating nucleosides include 2′-O methyl, F and locked nucleic acids (LNA).

[0070] Bridging the 5′ terminus of the first region 102 and the first flanking region 104 is a first operational region 105. Traditionally this operational region comprises a Start codon. The operational region may alternatively comprise any translation initiation sequence or signal including a Start codon.

[0071] Bridging the 3′ terminus of the first region 102 and the second flanking region 106 is a second operational region 107. Traditionally this operational region comprises a Stop codon. The operational region may alternatively comprise any translation initiation sequence or signal including a Stop codon. Multiple serial stop codons may also be used in the IVT polynucleotide. In one embodiment, the operation region of the present invention may comprise two stop codons. The first stop codon may be “TGA” or “UGA” and the second stop codon may be selected from the group consisting of “TAA,” “TGA,” “TAG,” “UAA,” “UGA” or “UAG.”

[0072] The shortest length of the first region of the primary construct of the IVT polynucleotide of the present invention can be the length of a nucleic acid sequence that is sufficient to encode for a dipeptide, a tripeptide, a tetrapeptide, a pentapeptide, a hexapeptide, a heptapeptide, an octapeptide, a nonapeptide, or a decapeptide. In another embodiment, the length may be sufficient to encode a peptide of 2-30 amino acids, e.g. 5-30, 10-30, 2-25, 5-25, 10-25, or 10-20 amino acids. The length may be sufficient to encode for a peptide of at least 11, 12, 13, 14, 15, 17, 20, 25 or 30 amino acids, or a peptide that is no longer than 40 amino acids, e.g. no longer than 35, 30, 25, 20, 17, 15, 14, 13, 12, 11 or 10 amino acids. Examples of dipeptides that the polynucleotide sequences can encode or include, but are not limited to, carnosine and anserine.

[0073] The length of the first region of the primary construct of the IVT polynucleotide encoding the polypeptide of interest of the present invention is greater than about 30 nucleotides in length (e.g., at least or greater than about 35, 40, 45, 50, 55, 60, 70, 80, 90, 100, 120, 140, 160, 180, 200, 250, 300, 350, 400, 450, 500, 600, 700, 800, 900, 1,000, 1,100, 1,200, 1,300, 1,400, 1,500, 1,600, 1,700, 1,800, 1,900, 2,000, 2,500, and 3,000, 4,000, 5,000, 6,000, 7,000, 8,000, 9,000, 10,000, 20,000, 30,000, 40,000, 50,000, 60,000, 70,000, 80,000, 90,000 or up to and including 100,000 nucleotides).

[0074] In some embodiments, the IVT polynucleotide includes from about 30 to about 100,000 nucleotides (e.g., from 30 to 50, from 30 to 100, from 30 to 250, from 30 to 500, from 30 to 1,000, from 30 to 1,500, from 30 to 3,000, from 30 to 5,000, from 30 to 7,000, from 30 to 10,000, from 30 to 25,000, from 30 to 50,000, from 30 to 70,000, from 100 to 250, from 100 to 500, from 100 to 1,000, from 100 to 1,500, from 100 to 3,000, from 100 to 5,000, from 100 to 7,000, from 100 to 10,000, from 100 to 25,000, from 100 to 50,000, from 100 to 70,000, from 100 to 100,000, from 500 to 1,000, from 500 to 1,500, from 500 to 2,000, from 500 to 3,000, from 500 to 5,000, from 500 to 7,000, from 500 to 10,000, from 500 to 25,000, from 500 to 50,000, from 500 to 70,000, from 500 to 100,000, from 1,000 to 1,500, from 1,000 to 2,000, from 1,000 to 3,000, from 1,000 to 5,000, from 1,000 to 7,000, from 1,000 to 10,000, from 1,000 to 25,000, from 1,000 to 50,000, from 1,000 to 70,000, from 1,000 to 100,000, from 1,500 to 3,000, from 1,500 to 5,000, from 1,500 to 7,000, from 1,500 to 10,000, from 1,500 to 25,000, from 1,500 to 50,000, from 1,500 to 70,000, from 1,500 to 100,000, from 2,000 to 3,000, from 2,000 to 5,000, from 2,000 to 7,000, from 2,000 to 10,000, from 2,000 to 25,000, from 2,000 to 50,000, from 2,000 to 70,000, and from 2,000 to 100,000).

[0075] According to the present invention, the first and second flanking regions of the IVT polynucleotide may range independently from 15-1,000 nucleotides in length (e.g., greater than 30, 40, 45, 50, 55, 60, 70, 80, 90, 100, 120, 140, 160, 180, 200, 250, 300, 350, 400, 450, 500, 600, 700, 800, and 900 nucleotides or at least 30, 40, 45, 50, 55, 60, 70, 80, 90, 100, 120, 140, 160, 180, 200, 250, 300, 350, 400, 450, 500, 600, 700, 800, 900, and 1,000 nucleotides).

[0076] According to the present invention, the tailing sequence of the IVT polynucleotide may range from absent to 500 nucleotides in length (e.g., at least 60, 70, 80, 90, 120, 140, 160, 180, 200, 250, 300, 350, 400, 450, or 500 nucleotides). Where the tailing region is a polyA tail, the length may be determined in units of or as a function of polyA Binding Protein binding. In this embodiment, the polyA tail is long enough to bind at least 4 monomers of PolyA Binding Protein. PolyA Binding Protein monomers bind to stretches of approximately 38 nucleotides. As such, it has been observed that polyA tails of about 80 nucleotides and 160 nucleotides are functional.

[0077] According to the present invention, the capping region of the IVT polynucleotide may comprise a single cap or a series of nucleotides forming the cap. In this embodiment the capping region may be from 1 to 10, e.g. 2-9, 3-8, 4-7, 1-5, 5-10, or at least 2, or 10 or fewer nucleotides in length. In some embodiments, the cap is absent.

[0078] According to the present invention, the first and second operational regions of the IVT polynucleotide may range from 3 to 40, e.g., 5-30, 10-20, 15, or at least 4, or 30 or fewer nucleotides in length and may comprise, in addition to a Start and/or Stop codon, one or more signal and/or restriction sequences.

[0079] In one embodiment, the IVT polynucleotides of the present invention may be structurally modified or chemically modified. When the IVT polynucleotides of the present invention are chemically and/or structurally modified the polynucleotides may be referred to as “modified IVT polynucleotides.”

[0080] In one embodiment, if the IVT polynucleotides of the present invention are chemically modified they may have a uniform chemical modification of all or any of the same nucleoside type or a population of modifications produced by mere downward titration of the same starting modification in all or any of the same nucleoside type, or a measured percent of a chemical modification of all any of the same nucleoside type but with random incorporation, such as where all uridines are replaced by a uridine analog, e.g., pseudouridine. In another embodiment, the IVT polynucleotides may have a uniform chemical modification of two, three, or four of the same nucleoside type throughout the entire polynucleotide (such as all uridines and all cytosines, etc. are modified in the same way).

[0081] In one embodiment, the IVT polynucleotides of the present invention may include a sequence encoding a self-cleaving peptide, described herein, such as but not limited to the 2A peptide. The polynucleotide sequence of the 2A peptide in the IVT polynucleotide may be modified or codon optimized by the methods described herein and/or are known in the art.

[0082] In one embodiment, this sequence may be used to separate the coding region of two or more polypeptides of interest in the IVT polynucleotide.

[0083] In one embodiment, the IVT polynucleotide of the present invention may be structurally and/or chemically modified. When chemically modified and/or structurally modified the IVT polynucleotide may be referred to as a “modified IVT polynucleotide.”

[0084] In one embodiment, the IVT polynucleotide may encode at least one peptide or polypeptide of interest. In another embodiment, the IVT polynucleotide may encode two or more peptides or polypeptides of interest. Non-limiting examples of peptides or polypeptides of interest include heavy and light chains of antibodies, an enzyme and its substrate, a label and its binding molecule, a second messenger and its enzyme or the components of multimeric proteins or complexes.

[0085] IVT polynucleotides (such as, but not limited to, primary constructs), formulations and compositions comprising IVT polynucleotides, and methods of making, using and administering IVT polynucleotides are described in co-pending International Publication Nos. WO2013151666, WO2013151667, WO2013151668, WO2013151663, WO2013151669, WO2013151670, WO2013151664, WO2013151665, WO2013151736, WO2013151671 and WO2013151672; the contents of each of which are herein incorporated by reference in their entireties.

### Chimeric Polynucleotide Architecture

[0086] The chimeric polynucleotides of the present invention maintain a modular organization similar to IVT polynucleotides, but the chimeric polynucleotides comprise one or more structural and/or chemical modifications or alterations which impart useful properties to the polynucleotide. As such, the chimeric polynucleotides which are modified mRNA molecules of the present invention are termed “chimeric modified mRNA” or “chimeric mRNA.”

[0087] Chimeric polynucleotides have portions or regions which differ in size and/or chemical modification pattern, chemical modification position, chemical modification percent or chemical modification population and combinations of the foregoing.

[0088] Examples of parts or regions, where the chimeric polynucleotide functions as an mRNA and encodes a polypeptide of interest include, but are not limited to, untranslated regions (UTRs, such as the 5′ UTR or 3′ UTR), coding regions, cap regions, polyA tail regions, start regions, stop regions, signal sequence regions, and combinations thereof. FIG. 2 illustrates certain embodiments of the chimeric polynucleotides of the invention which may be used as mRNA. FIG. 3 illustrates a schematic of a series of chimeric polynucleotides identifying various patterns of positional modifications and showing regions analogous to those regions of an mRNA polynucleotide. Regions or parts that join or lie between other regions may also be designed to have subregions. These are shown in the figure.

[0089] In some embodiments, the chimeric polynucleotides of the invention have a structure comprising Formula I as described in paragraphs [00090]-[00099] in International Patent Publication No. WO2015058069, the contents of which are herein incorporated by reference in its entirety.

[0090] In some embodiments the chimeric polynucleotide of Formula I encodes one or more peptides or polypeptides of interest. Such encoded molecules may be encoded across two or more regions.

[0091] In one embodiment, at least one of the regions of linked nucleosides of A may comprise a sequence of linked nucleosides which can function as a 5′ untranslated region (UTR). The sequence of linked nucleosides may be a natural or synthetic 5′ UTR. As a non-limiting example, the chimeric polynucleotide may encode a polypeptide of interest and the sequence of linked nucleosides of A may encode the native 5′ UTR of a polypeptide encoded by the chimeric polynucleotide or the sequence of linked nucleosides may be a non-heterologous 5′ UTR such as, but not limited to a synthetic UTR.

[0092] In another embodiment, at least one of the regions of linked nucleosides of A may be a cap region. The cap region may be located 5′ to a region of linked nucleosides of A functioning as a 5′UTR. The cap region may comprise at least one cap such as, but not limited to, Cap0, Cap1, ARCA, inosine, N1-methyl-guanosine, 2′fluoro-guanosine, 7-deaza-guanosine, 8-oxo-guanosine, 2-amino-guanosine, LNA-guanosine, 2-azido-guanosine, Cap2 and Cap4.

[0093] In one embodiment, at least one of the regions of linked nucleosides of B may comprise at least one open reading frame of a nucleic acid sequence. The nucleic acid sequence may be codon optimized and/or comprise at least one modification.

[0094] In one embodiment, at least one of the regions of linked nucleosides of C may comprise a sequence of linked nucleosides which can function as a 3′ UTR. The sequence of linked nucleosides may be a natural or synthetic 3′ UTR. As a non-limiting example, the chimeric polynucleotide may encode a polypeptide of interest and the sequence of linked nucleosides of C may encode the native 3′ UTR of a polypeptide encoded by the chimeric polynucleotide or the sequence of linked nucleosides may be a non-heterologous 3′ UTR such as, but not limited to a synthetic UTR.

[0095] In one embodiment, at least one of the regions of linked nucleosides of A comprises a sequence of linked nucleosides which functions as a 5′ UTR and at least one of the regions of linked nucleosides of C comprises a sequence of linked nucleosides which functions as a 3′ UTR. In one embodiment, the 5′ UTR and the 3′ UTR may be from the same or different species. In another embodiment, the 5′ UTR and the 3′ UTR may encode the native untranslated regions from different proteins from the same or different species.

[0096] FIGS. 4 and 5 provide schematics of a series of chimeric polynucleotides illustrating various patterns of positional modifications based on Formula I as well as those having a blocked or structured 3′ terminus.

[0097] Chimeric polynucleotides, including the parts or regions thereof, of the present invention may be classified as hemimers, gapmers, wingmers, or blockmers.

[0098] As used herein, a “hemimer” is chimeric polynucleotide comprising a region or part which comprises half of one pattern, percent, position or population of a chemical modification(s) and half of a second pattern, percent, position or population of a chemical modification(s). Chimeric polynucleotides of the present invention may also comprise hemimer subregions. In one embodiment, a part or region is 50% of one and 50% of another.

[0099] In one embodiment the entire chimeric polynucleotide can be 50% of one and 50% of the other. Any region or part of any chimeric polynucleotide of the invention may be a hemimer. Types of hemimers include pattern hemimers, population hemimers or position hemimers. By definition, hemimers are 50:50 percent hemimers.

[0100] As used herein, a “gapmer” is a chimeric polynucleotide having at least three parts or regions with a gap between the parts or regions. The “gap” can comprise a region of linked nucleosides or a single nucleoside which differs from the chimeric nature of the two parts or regions flanking it. The two parts or regions of a gapmer may be the same or different from each other.

[0101] As used herein, a “wingmer” is a chimeric polynucleotide having at least three parts or regions with a gap between the parts or regions. Unlike a gapmer, the two flanking parts or regions surrounding the gap in a wingmer are the same in degree or kind. Such similarity may be in the length of number of units of different modifications or in the number of modifications. The wings of a wingmer may be longer or shorter than the gap. The wing parts or regions may be 20, 30, 40, 50, 60 70, 80, 90 or 95% greater or shorter in length than the region which comprises the gap.

[0102] As used herein, a “blockmer” is a patterned polynucleotide where parts or regions are of equivalent size or number and type of modifications. Regions or subregions in a blockmer may be 50, 51, 52, 53, 54, 55, 56, 57, 58, 59, 60, 61 62, 63, 64, 65, 66, 67, 68, 69, 70, 71, 72, 73, 74, 75, 76, 77, 78, 79, 80, 81, 82, 83, 84, 85, 86, 87, 88, 89, 90, 91, 92, 93, 94, 95, 96, 97, 98, 99, 100, 101, 102, 103, 104, 105, 106, 107, 108, 109, 110, 111, 112, 113, 114, 115, 116, 117, 118, 119, 120, 121, 122, 123, 124, 125, 126, 127, 128, 129, 130, 131, 132, 133, 134, 135, 136, 137, 138, 139, 140, 141, 142, 143, 144, 145, 146, 147, 148, 149, 150, 151, 152, 153, 154, 155, 156, 157, 158, 159, 160, 161, 162, 163, 164, 165, 166, 167, 168, 169, 170, 171, 172, 173, 174, 175, 176, 177, 178, 179, 180, 181, 182, 183, 184, 185, 186, 187, 188, 189, 190, 191, 192, 193, 194, 195, 196, 197, 198, 199, 200, 201, 202, 203, 204, 205, 206, 207, 208, 209, 210, 211, 212, 213, 214, 215, 216, 217, 218, 219, 220, 221, 222, 223, 224, 225, 226, 227, 228, 229, 230, 231, 232, 233, 234, 235, 236, 237, 238, 239, 240, 241, 242, 243, 244, 245, 246, 247, 248, 249, 250, 251, 252, 253, 254, 255, 256, 257, 258, 259, 260, 261, 262, 263, 264, 265, 266, 267, 268, 269, 270, 271, 272, 273, 274, 275, 276, 277, 278, 279, 280, 281, 282, 283, 284, 285, 286, 287, 288, 289, 290, 291, 292, 293, 294, 295, 296, 297, 298, 299, 300, 310, 320, 330, 340, 350, 360, 370, 380, 390, 400, 410, 420, 430, 440, 450, 460, 470, 480, 490 or 500, nucleosides long.

[0103] Chimeric polynucleotides, including the parts or regions thereof, of the present invention having a chemical modification pattern are referred to as “pattern chimeras.” Pattern chimeras may also be referred to as blockmers. Pattern chimeras are those polynucleotides having a pattern of modifications within, across or among regions or parts.

[0104] Patterns of modifications within a part or region are those which start and stop within a defined region. Patterns of modifications across a part or region are those patterns which start in on part or region and end in another adjacent part or region. Patterns of modifications among parts or regions are those which begin and end in one part or region and are repeated in a different part or region, which is not necessarily adjacent to the first region or part.

[0105] The regions or subregions of pattern chimeras or blockmers may have simple alternating patterns such as ABAB[AB]n where each “A” and each “B” represent different chemical modifications (at least one of the base, sugar or backbone linker), different types of chemical modifications (e.g., naturally occurring and non-naturally occurring), different percentages of modifications or different populations of modifications. The pattern may repeat n number of times where n=3-300. Further, each A or B can represent from 1-2500 units (e.g., nucleosides) in the pattern. Patterns may also be alternating multiples such as AABBAABB[AABB]n (an alternating double multiple) or AAABBBAAABBB[AAABBB]n (an alternating triple multiple) pattern. The pattern may repeat n number of times where n=3-300.

[0106] Different patterns may also be mixed together to form a second order pattern. For example, a single alternating pattern may be combined with a triple alternating pattern to form a second order alternating pattern A′B′. One example would be [ABABAB][AAABBBAAABBB][ABABAB][AAABBBAAABBB][ABABAB][AAABBBAAABBB], where [ABABAB] is A′ and [AAABBBAAABBB] is B′. In like fashion, these patterns may be repeated n number of times, where n=3-300.

[0107] Patterns may include three or more different modifications to form an ABCABC[ABC]n pattern. These three component patterns may also be multiples, such as AABBCCAABBCC[AABBCC]n and may be designed as combinations with other patterns such as ABCABCAABBCCABCABCAABBCC, and may be higher order patterns.

[0108] Regions or subregions of position, percent, and population modifications need not reflect an equal contribution from each modification type. They may form series such as “1-2-3-4”, “1-2-4-8”, where each integer represents the number of units of a particular modification type. Alternatively, they may be odd only, such as ‘1-3-3-1-3-1-5” or even only “2-4-2-4-6-4-8” or a mixture of both odd and even number of units such as “1-3-4-2-5-7-3-3-4”.

[0109] Pattern chimeras may vary in their chemical modification by degree (such as those described above) or by kind (e.g., different modifications).

[0110] Chimeric polynucleotides, including the parts or regions thereof, of the present invention having at least one region with two or more different chemical modifications of two or more nucleoside members of the same nucleoside type (A, C, G, T, or U) are referred to as “positionally modified” chimeras. Positionally modified chimeras are also referred to herein as “selective placement” chimeras or “selective placement polynucleotides”. As the name implies, selective placement refers to the design of polynucleotides which, unlike polynucleotides in the art where the modification to any A, C, G, T or U is the same by virtue of the method of synthesis, can have different modifications to the individual As, Cs, Gs, Ts or Us in a polynucleotide or region thereof. For example, in a positionally modified chimeric polynucleotide, there may be two or more different chemical modifications to any of the nucleoside types of As, Cs, Gs, Ts, or Us. There may also be combinations of two or more to any two or more of the same nucleoside type. For example, a positionally modified or selective placement chimeric polynucleotide may comprise 3 different modifications to the population of adenines in the molecule and also have 3 different modifications to the population of cytosines in the construct—all of which may have a unique, non-random, placement.

[0111] Chimeric polynucleotides, including the parts or regions thereof, of the present invention having a chemical modification percent are referred to as “percent chimeras.” Percent chimeras may have regions or parts which comprise at least 1%, at least 2%, at least 5%, at least 8%, at least 10%, at least 20%, at least 30%, at least 40%, at least 50%, at least 60%, at least 70%, at least 80%, at least 90%, at least 95%, or at least 99% positional, pattern or population of modifications. Alternatively, the percent chimera may be completely modified as to modification position, pattern, or population. The percent of modification of a percent chimera may be split between naturally occurring and non-naturally occurring modifications.

[0112] Chimeric polynucleotides, including the parts or regions thereof, of the present invention having a chemical modification population are referred to as “population chimeras.” A population chimera may comprise a region or part where nucleosides (their base, sugar or backbone linkage, or combination thereof) have a select population of modifications. Such modifications may be selected from functional populations such as modifications which induce, alter or modulate a phenotypic outcome. For example, a functional population may be a population or selection of chemical modifications which increase the level of a cytokine. Other functional populations may individually or collectively function to decrease the level of one or more cytokines. Use of a selection of these like-function modifications in a chimeric polynucleotide would therefore constitute a “functional population chimera.” As used herein, a “functional population chimera” may be one whose unique functional feature is defined by the population of modifications as described above or the term may apply to the overall function of the chimeric polynucleotide itself. For example, as a whole the chimeric polynucleotide may function in a different or superior way as compared to an unmodified or non-chimeric polynucleotide.

[0113] It should be noted that polynucleotides which have a uniform chemical modification of all of any of the same nucleoside type or a population of modifications produced by mere downward titration of the same starting modification in all of any of the same nucleoside type, or a measured percent of a chemical modification of all any of the same nucleoside type but with random incorporation, such as where all uridines are replaced by a uridine analog, e.g., pseudouridine, are not considered chimeric. Likewise, polynucleotides having a uniform chemical modification of two, three, or four of the same nucleoside type throughout the entire polynucleotide (such as all uridines and all cytosines, etc. are modified in the same way) are not considered chimeric polynucleotides. One example of a polynucleotide which is not chimeric is the canonical pseudouridine/5-methyl cytosine modified polynucleotide of the prior art. These uniform polynucleotides are arrived at entirely via in vitro transcription (IVT) enzymatic synthesis; and due to the limitations of the synthesizing enzymes, they contain only one kind of modification at the occurrence of each of the same nucleoside type, i.e., adenosine (A), thymidine (T), guanosine (G), cytidine (C) or uridine (U), found in the polynucleotide. Such polynucleotides may be characterized as IVT polynucleotides.

[0114] The chimeric polynucleotides of the present invention may be structurally modified or chemically modified. When the chimeric polynucleotides of the present invention are chemically and/or structurally modified the polynucleotides may be referred to as “modified chimeric polynucleotides.”

[0115] In some embodiments of the invention, the chimeric polynucleotides may encode two or more peptides or polypeptides of interest. Such peptides or polypeptides of interest include the heavy and light chains of antibodies, an enzyme and its substrate, a label and its binding molecule, a second messenger and its enzyme or the components of multimeric proteins or complexes.

[0116] The regions or parts of the chimeric polynucleotides of the present invention may be separated by a linker or spacer moiety. Such linkers or spaces may be nucleic acid based or non-nucleosidic.

[0117] In one embodiment, the chimeric polynucleotides of the present invention may include a sequence encoding a self-cleaving peptide described herein, such as, but not limited to, a 2A peptide. The polynucleotide sequence of the 2A peptide in the chimeric polynucleotide may be modified or codon optimized by the methods described herein and/or are known in the art.

[0118] Notwithstanding the foregoing, the chimeric polynucleotides of the present invention may comprise a region or part which is not positionally modified or not chimeric as defined herein.

[0119] For example, a region or part of a chimeric polynucleotide may be uniformly modified at one or more A, T, C, G, or U but according to the invention, the polynucleotides will not be uniformly modified throughout the entire region or part.

[0120] Regions or parts of chimeric polynucleotides may be from 15-1000 nucleosides in length and a polynucleotide may have from 2-100 different regions or patterns of regions as described herein.

[0121] In one embodiment, chimeric polynucleotides encode one or more polypeptides of interest. In another embodiment, the chimeric polynucleotides are substantially non-coding. In another embodiment, the chimeric polynucleotides have both coding and non-coding regions and parts.

[0122] FIG. 2 illustrates the design of certain chimeric polynucleotides of the present invention when based on the scaffold of the polynucleotide of FIG. 1. Shown in the figure are the regions or parts of the chimeric polynucleotides where patterned regions represent those regions which are positionally modified and open regions illustrate regions which may or may not be modified but which are, when modified, uniformly modified. Chimeric polynucleotides of the present invention may be completely positionally modified or partially positionally modified. They may also have subregions which may be of any pattern or design. Shown in FIG. 2 are a chimeric subregion and a hemimer subregion.

[0123] In one embodiment, the shortest length of a region of the chimeric polynucleotide of the present invention encoding a peptide can be the length that is sufficient to encode for a dipeptide, a tripeptide, a tetrapeptide, a pentapeptide, a hexapeptide, a heptapeptide, an octapeptide, a nonapeptide, or a decapeptide. In another embodiment, the length may be sufficient to encode a peptide of 2-30 amino acids, e.g. 5-30, 10-30, 2-25, 5-25, 10-25, or 10-20 amino acids. The length may be sufficient to encode for a peptide of at least 11, 12, 13, 14, 15, 17, 20, 25 or 30 amino acids, or a peptide that is no longer than 40 amino acids, e.g. no longer than 35, 30, 25, 20, 17, 15, 14, 13, 12, 11 or 10 amino acids. Examples of dipeptides that the polynucleotide sequences can encode or include, but are not limited to, carnosine and anserine.

[0124] In one embodiment, the length of a region of the chimeric polynucleotide of the present invention encoding the peptide or polypeptide of interest is greater than about 30 nucleotides in length (e.g., at least or greater than about 35, 40, 45, 50, 55, 60, 70, 80, 90, 100, 120, 140, 160, 180, 200, 250, 300, 350, 400, 450, 500, 600, 700, 800, 900, 1,000, 1,100, 1,200, 1,300, 1,400, 1,500, 1,600, 1,700, 1,800, 1,900, 2,000, 2,500, and 3,000, 4,000, 5,000, 6,000, 7,000, 8,000, 9,000, 10,000, 20,000, 30,000, 40,000, 50,000, 60,000, 70,000, 80,000, 90,000 or up to and including 100,000 nucleotides). As used herein, such a region may be referred to as a “coding region” or “region encoding.”

[0125] In some embodiments, the chimeric polynucleotide includes from about 30 to about 100,000 nucleotides (e.g., from 30 to 50, from 30 to 100, from 30 to 250, from 30 to 500, from 30 to 1,000, from 30 to 1,500, from 30 to 3,000, from 30 to 5,000, from 30 to 7,000, from 30 to 10,000, from 30 to 25,000, from 30 to 50,000, from 30 to 70,000, from 100 to 250, from 100 to 500, from 100 to 1,000, from 100 to 1,500, from 100 to 3,000, from 100 to 5,000, from 100 to 7,000, from 100 to 10,000, from 100 to 25,000, from 100 to 50,000, from 100 to 70,000, from 100 to 100,000, from 500 to 1,000, from 500 to 1,500, from 500 to 2,000, from 500 to 3,000, from 500 to 5,000, from 500 to 7,000, from 500 to 10,000, from 500 to 25,000, from 500 to 50,000, from 500 to 70,000, from 500 to 100,000, from 1,000 to 1,500, from 1,000 to 2,000, from 1,000 to 3,000, from 1,000 to 5,000, from 1,000 to 7,000, from 1,000 to 10,000, from 1,000 to 25,000, from 1,000 to 50,000, from 1,000 to 70,000, from 1,000 to 100,000, from 1,500 to 3,000, from 1,500 to 5,000, from 1,500 to 7,000, from 1,500 to 10,000, from 1,500 to 25,000, from 1,500 to 50,000, from 1,500 to 70,000, from 1,500 to 100,000, from 2,000 to 3,000, from 2,000 to 5,000, from 2,000 to 7,000, from 2,000 to 10,000, from 2,000 to 25,000, from 2,000 to 50,000, from 2,000 to 70,000, and from 2,000 to 100,000).

[0126] According to the present invention, regions or subregions of the chimeric polynucleotides may also range independently from 15-1,000 nucleotides in length (e.g., greater than 30, 40, 45, 50, 55, 60, 70, 80, 90, 100, 110, 120, 130, 140, 150, 160, 170, 180, 190, 200, 225, 250, 275, 300, 325, 350, 375, 400, 425, 450, 475, 500, 550, 600, 650, 700, 750, 800, 850, 900 and 950 nucleotides or at least 30, 40, 45, 50, 55, 60, 70, 80, 90, 100, 110, 120, 130, 140, 150, 160, 170, 180, 190, 200, 225, 250, 275, 300, 325, 350, 375, 400, 425, 450, 475, 500, 550, 600, 650, 700, 750, 800, 850, 900, 950 and 1,000 nucleotides).

[0127] According to the present invention, regions or subregions of chimeric polynucleotides may range from absent to 500 nucleotides in length (e.g., at least 60, 70, 80, 90, 100, 110, 120, 130, 140, 150, 160, 170, 180, 190, 200, 250, 300, 350, 400, 450, or 500 nucleotides). Where the region is a polyA tail, the length may be determined in units of or as a function of polyA Binding Protein binding. In this embodiment, the polyA tail is long enough to bind at least 4 monomers of PolyA Binding Protein. PolyA Binding Protein monomers bind to stretches of approximately 38 nucleotides. As such, it has been observed that polyA tails of about 80 nucleotides to about 160 nucleotides are functional. The chimeric polynucleotides of the present invention which function as an mRNA need not comprise a polyA tail.

[0128] According to the present invention, chimeric polynucleotides which function as an mRNA may have a capping region. The capping region may comprise a single cap or a series of nucleotides forming the cap. In this embodiment the capping region may be from 1 to 10, e.g. 2-9, 3-8, 4-7, 1-5, 5-10, or at least 2, or 10 or fewer nucleotides in length. In some embodiments, the cap is absent.

[0129] The present invention contemplates chimeric polynucleotides which are circular or cyclic. As the name implies circular polynucleotides are circular in nature meaning that the termini are joined in some fashion, whether by ligation, covalent bond, common association with the same protein or other molecule or complex or by hybridization. Any of the circular polynucleotides as taught in, for example, International Patent Publication No. WO2015034925 (Attorney Docket number M51.20), the contents of which are incorporated herein by reference in their entirety, may be made chimeric according to the present invention.

[0130] Chimeric polynucleotides, formulations and compositions comprising chimeric polynucleotides, and methods of making, using and administering chimeric polynucleotides are also described in International Patent Publication No. WO2015034928 (Attorney Docket No. M057.20), the contents of which is incorporated by reference in its entirety.

### Circular Polynucleotide Architecture

[0131] The present invention contemplates polynucleotides which are circular or cyclic. As the name implies circular polynucleotides are circular in nature meaning that the termini are joined in some fashion, whether by ligation, covalent bond, common association with the same protein or other molecule or complex or by hybridization. Any of the circular polynucleotides as taught in, for example, International Patent Publication No. WO2015034925 (Attorney Docket number M51.20), the contents of which are incorporated herein by reference in their entirety.

[0132] Circular polynucleotides of the present invention may be designed according to the circular RNA construct scaffolds shown in FIGS. 6-12 of International Patent Publication No. WO2015058069, the contents of which are herein incorporated by reference in its entirety. FIGS. 6-12 are described in paragraphs [000145]-[000154] of International Patent Publication No. WO2015058069, the contents of which are herein incorporated by reference in its entirety. Such polynucleotides are circular polynucleotides or circular constructs.

[0133] The circular polynucleotides or circPs of the present invention which encode at least one peptide or polypeptide of interest are known as circular RNAs or circRNA. As used herein, “circular RNA” or “circRNA” means a circular polynucleotide that can encode at least one peptide or polypeptide of interest. The circPs of the present invention which comprise at least one sensor sequence and do not encode a peptide or polypeptide of interest are known as circular sponges or circSP. As used herein, “circular sponges,” “circular polynucleotide sponges” or “circSP” means a circular polynucleotide which comprises at least one sensor sequence and does not encode a polypeptide of interest. As used herein, “sensor sequence” means a receptor or pseudo-receptor for endogenous nucleic acid binding molecules. Non-limiting examples of sensor sequences include, microRNA binding sites, microRNA seed sequences, microRNA binding sites without the seed sequence, transcription factor binding sites and artificial binding sites engineered to act as pseudo-receptors and portions and fragments thereof.

[0134] The circPs of the present invention which comprise at least one sensor sequence and encode at least one peptide or polypeptide of interest are known as circular RNA sponges or circRNA-SP. As used herein, “circular RNA sponges” or “circRNA-SP” means a circular polynucleotide which comprises at least one sensor sequence and at least one region encoding at least one peptide or polypeptide of interest.

[0135] Circular polynucleotides, formulations and compositions comprising circular polynucleotides, and methods of making, using and administering circular polynucleotides are also described in International Patent Publication No. WO2015034925, the contents of which is incorporated by reference in its entirety.

### Multimers of Polynucleotides

[0136] According to the present invention, multiple distinct chimeric polynucleotides and/or IVT polynucleotides may be linked together through the 3′-end using nucleotides which are modified at the 3′-terminus. Chemical conjugation may be used to control the stoichiometry of delivery into cells. For example, the glyoxylate cycle enzymes, isocitrate lyase and malate synthase, may be supplied into cells at a 1:1 ratio to alter cellular fatty acid metabolism. This ratio may be controlled by chemically linking chimeric polynucleotides and/or IVT polynucleotides using a 3′-azido terminated nucleotide on one polynucleotides species and a C5-ethynyl or alkynyl-containing nucleotide on the opposite polynucleotide species. The modified nucleotide is added post-transcriptionally using terminal transferase (New England Biolabs, Ipswich, Mass.) according to the manufacturer's protocol. After the addition of the 3′-modified nucleotide, the two polynucleotides species may be combined in an aqueous solution, in the presence or absence of copper, to form a new covalent linkage via a click chemistry mechanism as described in the literature.

[0137] In another example, more than two chimeric polynucleotides and/or IVT polynucleotides may be linked together using a functionalized linker molecule. For example, a functionalized saccharide molecule may be chemically modified to contain multiple chemical reactive groups (SH—, NH₂—, N₃, etc. . . . ) to react with the cognate moiety on a 3′-functionalized mRNA molecule (i.e., a 3′-maleimide ester, 3′-NHS-ester, alkynyl). The number of reactive groups on the modified saccharide can be controlled in a stoichiometric fashion to directly control the stoichiometric ratio of conjugated chimeric polynucleotides and/or IVT polynucleotides.

[0138] In one embodiment, the chimeric polynucleotides and/or IVT polynucleotides may be linked together in a pattern. The pattern may be a simple alternating pattern such as CD[CD]ₓ where each “C” and each “D” represent a chimeric polynucleotide, IVT polynucleotide, different chimeric polynucleotides or different IVT polynucleotides. The pattern may repeat x number of times, where x=1-300. Patterns may also be alternating multiples such as CCDD[CCDD]ₓ (an alternating double multiple) or CCCDDD[CCCDDD]ₓ (an alternating triple multiple) pattern. The alternating double multiple or alternating triple multiple may repeat x number of times, where x=1-300.

### Conjugates and Combinations of Polynucleotides

[0139] In order to further enhance protein production, polynucleotides of the present invention can be designed to be conjugated to other polynucleotides, dyes, intercalating agents (e.g. acridines), cross-linkers (e.g. psoralene, mitomycin C), porphyrins (TPPC4, texaphyrin, Sapphyrin), polycyclic aromatic hydrocarbons (e.g., phenazine, dihydrophenazine), artificial endonucleases (e.g. EDTA), alkylating agents, phosphate, amino, mercapto, PEG (e.g., PEG-40K), MPEG, [MPEG]₂, polyamino, alkyl, substituted alkyl, radiolabeled markers, enzymes, haptens (e.g. biotin), transport/absorption facilitators (e.g., aspirin, vitamin E, folic acid), synthetic ribonucleases, proteins, e.g., glycoproteins, or peptides, e.g., molecules having a specific affinity for a co-ligand, or antibodies e.g., an antibody, that binds to a specified cell type such as a cancer cell, endothelial cell, or bone cell, hormones and hormone receptors, non-peptidic species, such as lipids, lectins, carbohydrates, vitamins, cofactors, or a drug.

[0140] Conjugation may result in increased stability and/or half-life and may be particularly useful in targeting the polynucleotides to specific sites in the cell, tissue or organism.

[0141] According to the present invention, the polynucleotides may be administered with, conjugated to or further encode one or more of RNAi agents, siRNAs, shRNAs, miRNAs, miRNA binding sites, antisense RNAs, ribozymes, catalytic DNA, tRNA, RNAs that induce triple helix formation, aptamers or vectors, and the like.

### Bifunctional Polynucleotides

[0142] In one embodiment of the invention are bifunctional polynucleotides (e.g., bifunctional IVT polynucleotides, bifunctional chimeric polynucleotides or bifunctional circular polynucleotides). As the name implies, bifunctional polynucleotides are those having or capable of at least two functions. These molecules may also by convention be referred to as multi-functional.

[0143] The multiple functionalities of bifunctional polynucleotides may be encoded by the RNA (the function may not manifest until the encoded product is translated) or may be a property of the polynucleotide itself. It may be structural or chemical. Bifunctional modified polynucleotides may comprise a function that is covalently or electrostatically associated with the polynucleotides. Further, the two functions may be provided in the context of a complex of a chimeric polynucleotide and another molecule.

[0144] Bifunctional polynucleotides may encode peptides which are anti-proliferative. These peptides may be linear, cyclic, constrained or random coil. They may function as aptamers, signaling molecules, ligands or mimics or mimetics thereof. Anti-proliferative peptides may, as translated, be from 3 to 50 amino acids in length. They may be 5-40, 10-30, or approximately 15 amino acids long. They may be single chain, multichain or branched and may form complexes, aggregates or any multi-unit structure once translated.

### Noncoding Polynucleotides

[0145] As described herein, provided are polynucleotides having sequences that are partially or substantially not translatable, e.g., having a noncoding region. As one non-limiting example, the noncoding region may be the first region of the IVT polynucleotide or the circular polynucleotide. Alternatively, the noncoding region may be a region other than the first region. As another non-limiting example, the noncoding region may be the A, B and/or C region of the chimeric polynucleotide.

[0146] Such molecules are generally not translated, but can exert an effect on protein production by one or more of binding to and sequestering one or more translational machinery components such as a ribosomal protein or a transfer RNA (tRNA), thereby effectively reducing protein expression in the cell or modulating one or more pathways or cascades in a cell which in turn alters protein levels. The polynucleotide may contain or encode one or more long noncoding RNA (lncRNA, or lincRNA) or portion thereof, a small nucleolar RNA (sno-RNA), micro RNA (miRNA), small interfering RNA (siRNA) or Piwi-interacting RNA (piRNA). Examples of such lncRNA molecules and RNAi constructs designed to target such lncRNA any of which may be encoded in the polynucleotides are taught in International Publication, WO2012/018881 A2, the contents of which are incorporated herein by reference in their entirety.

### Tolerogenic Polypeptides of Interest

[0147] Polynucleotides of the present invention may encode one or more tolerogenic peptides or polypeptides of interest. They may also affect the levels, signaling or function of one or more peptides or polypeptides. Tolerogenic polypeptides of interest, according to the present invention include any of those taught in, for example, those listed in Table 6 of International Publication Nos. WO2013151666, WO2013151667, WO2013151668, WO2013151663, WO2013151669, WO2013151670, WO2013151664, WO2013151665, WO2013151736, WO2013151671 and WO2013151672 and Table 178 of International Publication No. WO2013151671; the contents of each of which are herein incorporated by reference in their entireties.

[0148] According to the present invention, the polynucleotide may be designed to encode one or more polypeptides of interest or fragments thereof. Such polypeptide of interest may include, but is not limited to, whole polypeptides, a plurality of polypeptides or fragments of polypeptides, which independently may be encoded by one or more regions or parts or the whole of a polynucleotide. As used herein, the term “polypeptides of interest” refer to any polypeptide which is selected to be encoded within, or whose function is affected by, the polynucleotides of the present invention.

[0149] As used herein, “polypeptide” means a polymer of amino acid residues (natural or unnatural) linked together most often by peptide bonds. The term, as used herein, refers to proteins, polypeptides, and peptides of any size, structure, or function. In some instances the polypeptide encoded is smaller than about 50 amino acids and the polypeptide is then termed a peptide. If the polypeptide is a peptide, it will be at least about 2, 3, 4, or at least 5 amino acid residues long. Thus, polypeptides include gene products, naturally occurring polypeptides, synthetic polypeptides, homologs, orthologs, paralogs, fragments and other equivalents, variants, and analogs of the foregoing. A polypeptide may be a single molecule or may be a multi-molecular complex such as a dimer, trimer or tetramer. They may also comprise single chain or multichain polypeptides such as antibodies or insulin and may be associated or linked. Most commonly disulfide linkages are found in multichain polypeptides. The term polypeptide may also apply to amino acid polymers in which one or more amino acid residues are an artificial chemical analogue of a corresponding naturally occurring amino acid.

[0150] The term “polypeptide variant” refers to molecules which differ in their amino acid sequence from a native or reference sequence. The amino acid sequence variants may possess substitutions, deletions, and/or insertions at certain positions within the amino acid sequence, as compared to a native or reference sequence. Ordinarily, variants will possess at least about 50% identity (homology) to a native or reference sequence, and preferably, they will be at least about 80%, more preferably at least about 90% identical (homologous) to a native or reference sequence.

[0151] In some embodiments “variant mimics” are provided. As used herein, the term “variant mimic” is one which contains one or more amino acids which would mimic an activated sequence. For example, glutamate may serve as a mimic for phosphoro-threonine and/or phosphoro-serine. Alternatively, variant mimics may result in deactivation or in an inactivated product containing the mimic, e.g., phenylalanine may act as an inactivating substitution for tyrosine; or alanine may act as an inactivating substitution for serine.

[0152] “Homology” as it applies to amino acid sequences is defined as the percentage of residues in the candidate amino acid sequence that are identical with the residues in the amino acid sequence of a second sequence after aligning the sequences and introducing gaps, if necessary, to achieve the maximum percent homology. Methods and computer programs for the alignment are well known in the art. It is understood that homology depends on a calculation of percent identity but may differ in value due to gaps and penalties introduced in the calculation.

[0153] By “homologs” as it applies to polypeptide sequences means the corresponding sequence of other species having substantial identity to a second sequence of a second species.

[0154] “Analogs” is meant to include polypeptide variants which differ by one or more amino acid alterations, e.g., substitutions, additions or deletions of amino acid residues that still maintain one or more of the properties of the parent or starting polypeptide.

[0155] The present invention contemplates several types of compositions which are polypeptide based including variants and derivatives. These include substitutional, insertional, deletion and covalent variants and derivatives. The term “derivative” is used synonymously with the term “variant” but generally refers to a molecule that has been modified and/or changed in any way relative to a reference molecule or starting molecule.

[0156] As such, polynucleotides encoding peptides or polypeptides containing substitutions, insertions and/or additions, deletions and covalent modifications with respect to reference sequences, in particular the polypeptide sequences disclosed herein, are included within the scope of this invention. For example, sequence tags or amino acids, such as one or more lysines, can be added to the peptide sequences of the invention (e.g., at the N-terminal or C-terminal ends). Sequence tags can be used for peptide purification or localization. Lysines can be used to increase peptide solubility or to allow for biotinylation. Alternatively, amino acid residues located at the carboxy and amino terminal regions of the amino acid sequence of a peptide or protein may optionally be deleted providing for truncated sequences. Certain amino acids (e.g., C-terminal or N-terminal residues) may alternatively be deleted depending on the use of the sequence, as for example, expression of the sequence as part of a larger sequence which is soluble, or linked to a solid support.

[0157] “Substitutional variants” when referring to polypeptides are those that have at least one amino acid residue in a native or starting sequence removed and a different amino acid inserted in its place at the same position. The substitutions may be single, where only one amino acid in the molecule has been substituted, or they may be multiple, where two or more amino acids have been substituted in the same molecule.

[0158] As used herein the term “conservative amino acid substitution” refers to the substitution of an amino acid that is normally present in the sequence with a different amino acid of similar size, charge, or polarity. Examples of conservative substitutions include the substitution of a non-polar (hydrophobic) residue such as isoleucine, valine and leucine for another non-polar residue. Likewise, examples of conservative substitutions include the substitution of one polar (hydrophilic) residue for another such as between arginine and lysine, between glutamine and asparagine, and between glycine and serine. Additionally, the substitution of a basic residue such as lysine, arginine or histidine for another, or the substitution of one acidic residue such as aspartic acid or glutamic acid for another acidic residue are additional examples of conservative substitutions. Examples of non-conservative substitutions include the substitution of a non-polar (hydrophobic) amino acid residue such as isoleucine, valine, leucine, alanine, methionine for a polar (hydrophilic) residue such as cysteine, glutamine, glutamic acid or lysine and/or a polar residue for a non-polar residue.

[0159] “Insertional variants” when referring to polypeptides are those with one or more amino acids inserted immediately adjacent to an amino acid at a particular position in a native or starting sequence. “Immediately adjacent” to an amino acid means connected to either the alpha-carboxy or alpha-amino functional group of the amino acid.

[0160] “Deletional variants” when referring to polypeptides are those with one or more amino acids in the native or starting amino acid sequence removed. Ordinarily, deletional variants will have one or more amino acids deleted in a particular region of the molecule.

[0161] “Covalent derivatives” when referring to polypeptides include modifications of a native or starting protein with an organic proteinaceous or non-proteinaceous derivatizing agent, and/or post-translational modifications. Covalent modifications are traditionally introduced by reacting targeted amino acid residues of the protein with an organic derivatizing agent that is capable of reacting with selected side-chains or terminal residues, or by harnessing mechanisms of post-translational modifications that function in selected recombinant host cells. The resultant covalent derivatives are useful in programs directed at identifying residues important for biological activity, for immunoassays, or for the preparation of anti-protein antibodies for immunoaffinity purification of the recombinant glycoprotein. Such modifications are within the ordinary skill in the art and are performed without undue experimentation.

[0162] Certain post-translational modifications are the result of the action of recombinant host cells on the expressed polypeptide. Glutaminyl and asparaginyl residues are frequently post-translationally deamidated to the corresponding glutamyl and aspartyl residues. Alternatively, these residues are deamidated under mildly acidic conditions. Either form of these residues may be present in the polypeptides produced in accordance with the present invention.

[0163] Other post-translational modifications include hydroxylation of proline and lysine, phosphorylation of hydroxyl groups of seryl or threonyl residues, methylation of the alpha-amino groups of lysine, arginine, and histidine side chains (T. E. Creighton, Proteins: Structure and Molecular Properties, W.H. Freeman & Co., San Francisco, pp. 79-86 (1983)).

[0164] “Features” when referring to polypeptides are defined as distinct amino acid sequence-based components of a molecule. Features of the polypeptides encoded by the polynucleotides of the present invention include surface manifestations, local conformational shape, folds, loops, half-loops, domains, half-domains, sites, termini or any combination thereof.

[0165] As used herein when referring to polypeptides the term “surface manifestation” refers to a polypeptide based component of a protein appearing on an outermost surface.

[0166] As used herein when referring to polypeptides the term “local conformational shape” means a polypeptide based structural manifestation of a protein which is located within a definable space of the protein.

[0167] As used herein when referring to polypeptides the term “fold” refers to the resultant conformation of an amino acid sequence upon energy minimization. A fold may occur at the secondary or tertiary level of the folding process. Examples of secondary level folds include beta sheets and alpha helices. Examples of tertiary folds include domains and regions formed due to aggregation or separation of energetic forces. Regions formed in this way include hydrophobic and hydrophilic pockets, and the like.

[0168] As used herein the term “turn” as it relates to protein conformation means a bend which alters the direction of the backbone of a peptide or polypeptide and may involve one, two, three or more amino acid residues.

[0169] As used herein when referring to polypeptides the term “loop” refers to a structural feature of a polypeptide which may serve to reverse the direction of the backbone of a peptide or polypeptide. Where the loop is found in a polypeptide and only alters the direction of the backbone, it may comprise four or more amino acid residues. Oliva et al. have identified at least 5 classes of protein loops (J. Mol Biol 266 (4): 814-830; 1997). Loops may be open or closed. Closed loops or “cyclic” loops may comprise 2, 3, 4, 5, 6, 7, 8, 9, 10 or more amino acids between the bridging moieties. Such bridging moieties may comprise a cysteine-cysteine bridge (Cys-Cys) typical in polypeptides having disulfide bridges or alternatively bridging moieties may be non-protein based such as the dibromozylyl agents used herein.

[0170] As used herein when referring to polypeptides the term “half-loop” refers to a portion of an identified loop having at least half the number of amino acid resides as the loop from which it is derived. It is understood that loops may not always contain an even number of amino acid residues. Therefore, in those cases where a loop contains or is identified to comprise an odd number of amino acids, a half-loop of the odd-numbered loop will comprise the whole number portion or next whole number portion of the loop (number of amino acids of the loop/2+/−0.5 amino acids). For example, a loop identified as a 7 amino acid loop could produce half-loops of 3 amino acids or 4 amino acids (7/2=3.5+/−0.5 being 3 or 4).

[0171] As used herein when referring to polypeptides the term “domain” refers to a motif of a polypeptide having one or more identifiable structural or functional characteristics or properties (e.g., binding capacity, serving as a site for protein-protein interactions).

[0172] As used herein when referring to polypeptides the term “half-domain” means a portion of an identified domain having at least half the number of amino acid resides as the domain from which it is derived. It is understood that domains may not always contain an even number of amino acid residues. Therefore, in those cases where a domain contains or is identified to comprise an odd number of amino acids, a half-domain of the odd-numbered domain will comprise the whole number portion or next whole number portion of the domain (number of amino acids of the domain/2+/−0.5 amino acids). For example, a domain identified as a 7 amino acid domain could produce half-domains of 3 amino acids or 4 amino acids (7/2=3.5+/−0.5 being 3 or 4). It is also understood that sub-domains may be identified within domains or half-domains, these subdomains possessing less than all of the structural or functional properties identified in the domains or half domains from which they were derived. It is also understood that the amino acids that comprise any of the domain types herein need not be contiguous along the backbone of the polypeptide (i.e., nonadjacent amino acids may fold structurally to produce a domain, half-domain or subdomain).

[0173] As used herein when referring to polypeptides the terms “site” as it pertains to amino acid based embodiments is used synonymously with “amino acid residue” and “amino acid side chain.” A site represents a position within a peptide or polypeptide that may be modified, manipulated, altered, derivatized or varied within the polypeptide based molecules of the present invention.

[0174] As used herein the terms “termini” or “terminus” when referring to polypeptides refers to an extremity of a peptide or polypeptide. Such extremity is not limited only to the first or final site of the peptide or polypeptide but may include additional amino acids in the terminal regions. The polypeptide based molecules of the present invention may be characterized as having both an N-terminus (terminated by an amino acid with a free amino group (NH2)) and a C-terminus (terminated by an amino acid with a free carboxyl group (COOH)). Proteins of the invention are in some cases made up of multiple polypeptide chains brought together by disulfide bonds or by non-covalent forces (multimers, oligomers). These sorts of proteins will have multiple N- and C-termini. Alternatively, the termini of the polypeptides may be modified such that they begin or end, as the case may be, with a non-polypeptide based moiety such as an organic conjugate.

[0175] Once any of the features have been identified or defined as a desired component of a polypeptide to be encoded by the polynucleotide of the invention, any of several manipulations and/or modifications of these features may be performed by moving, swapping, inverting, deleting, randomizing or duplicating. Furthermore, it is understood that manipulation of features may result in the same outcome as a modification to the molecules of the invention. For example, a manipulation which involved deleting a domain would result in the alteration of the length of a molecule just as modification of a nucleic acid to encode less than a full length molecule would.

[0176] Modifications and manipulations can be accomplished by methods known in the art such as, but not limited to, site directed mutagenesis or a priori incorporation during chemical synthesis. The resulting modified molecules may then be tested for activity using in vitro or in vivo assays such as those described herein or any other suitable screening assay known in the art.

[0177] According to the present invention, the polypeptides may comprise a consensus sequence which is discovered through rounds of experimentation. As used herein a “consensus” sequence is a single sequence which represents a collective population of sequences allowing for variability at one or more sites.

[0178] As recognized by those skilled in the art, protein fragments, functional protein domains, and homologous proteins are also considered to be within the scope of polypeptides of interest of this invention. For example, provided herein is any protein fragment (meaning a polypeptide sequence at least one amino acid residue shorter than a reference polypeptide sequence but otherwise identical) of a reference protein 10, 20, 30, 40, 50, 60, 70, 80, 90, 100 or greater than 100 amino acids in length. In another example, any protein that includes a stretch of about 20, about 30, about 40, about 50, or about 100 amino acids which are about 40%, about 50%, about 60%, about 70%, about 80%, about 90%, about 95%, or about 100% identical to any of the sequences described herein can be utilized in accordance with the invention. In certain embodiments, a polypeptide to be utilized in accordance with the invention includes 2, 3, 4, 5, 6, 7, 8, 9, 10, or more mutations as shown in any of the sequences provided or referenced herein.

### Types of Polypeptides of Interest

[0179] The polynucleotides of the present invention may be designed to encode tolerogenic polypeptides of interest.

[0180] In one embodiment, polynucleotides may encode variant polypeptides which have a certain identity with a reference polypeptide sequence. As used herein, a “reference polypeptide sequence” refers to a starting polypeptide sequence. Reference sequences may be wild type sequences or any sequence to which reference is made in the design of another sequence. A “reference polypeptide sequence” may, e.g., be any one of those polypeptides disclosed in Table 6 of U International Publication Nos. WO2013151666, WO2013151667, WO2013151668, WO2013151663, WO2013151669, WO2013151670, WO2013151664, WO2013151665, WO2013151736, WO2013151671 and WO2013151672 and Table 178 of International Publication No. WO2013151671; the contents of each of which are herein incorporated by reference in their entireties.

[0181] Reference molecules (polypeptides or polynucleotides) may share a certain identity with the designed molecules (polypeptides or polynucleotides). The term “identity” as known in the art, refers to a relationship between the sequences of two or more peptides, polypeptides or polynucleotides, as determined by comparing the sequences. In the art, identity also means the degree of sequence relatedness between them as determined by the number of matches between strings of two or more amino acid residues or nucleosides. Identity measures the percent of identical matches between the smaller of two or more sequences with gap alignments (if any) addressed by a particular mathematical model or computer program (i.e., “algorithms”). Identity of related peptides can be readily calculated by known methods. Such methods include, but are not limited to, those described in Computational Molecular Biology, Lesk, A. M., ed., Oxford University Press, New York, 1988; Biocomputing: Informatics and Genome Projects, Smith, D. W., ed., Academic Press, New York, 1993; Computer Analysis of Sequence Data, Part 1, Griffin, A. M., and Griffin, H. G., eds., Humana Press, New Jersey, 1994; Sequence Analysis in Molecular Biology, von Heinje, G., Academic Press, 1987; Sequence Analysis Primer, Gribskov, M. and Devereux, J., eds., M. Stockton Press, New York, 1991; and Carillo et al., SIAM J. Applied Math. 48, 1073 (1988).

[0182] In some embodiments, the encoded polypeptide variant may have the same or a similar activity as the reference polypeptide. Alternatively, the variant may have an altered activity (e.g., increased or decreased) relative to a reference polypeptide. Generally, variants of a particular polynucleotide or polypeptide of the invention will have at least about 40%, 45%, 50%, 55%, 60%, 65%, 70%, 75%, 80%, 85%, 90%, 91%, 92%, 93%, 94%, 95%, 96%, 97%, 98%, 99% but less than 100% sequence identity to that particular reference polynucleotide or polypeptide as determined by sequence alignment programs and parameters described herein and known to those skilled in the art. Such tools for alignment include those of the BLAST suite (Stephen F. Altschul, Thomas L. Madden, Alejandro A. Schïffer, Jinghui Zhang, Zheng Zhang, Webb Miller, and David J. Lipman (1997), “Gapped BLAST and PSI-BLAST: a new generation of protein database search programs”, Nucleic Acids Res. 25:3389-3402.) Other tools are described herein, specifically in the definition of “Identity.”

[0183] Default parameters in the BLAST algorithm include, for example, an expect threshold of 10, Word size of 28, Match/Mismatch Scores 1, −2, Gap costs Linear. Any filter can be applied as well as a selection for species specific repeats, e.g., Homo sapiens.

Polynucleotides having Untranslated Regions (UTRs)

[0184] The polynucleotides of the present invention may comprise one or more regions or parts which act or function as an untranslated region. Where polynucleotides are designed to encode at least one polypeptide of interest, the polynucleotides may comprise one or more of these untranslated regions.

[0185] By definition, wild type untranslated regions (UTRs) of a gene are transcribed but not translated. In mRNA, the 5′UTR starts at the transcription start site and continues to the start codon but does not include the start codon; whereas, the 3′UTR starts immediately following the stop codon and continues until the transcriptional termination signal. There is growing body of evidence about the regulatory roles played by the UTRs in terms of stability of the nucleic acid molecule and translation. The regulatory features of a UTR can be incorporated into the polynucleotides of the present invention to, among other things, enhance the stability of the molecule. The specific features can also be incorporated to ensure controlled down-regulation of the transcript in case they are misdirected to undesired organs sites.

[0186] Tables 1 and 2 provide a listing of exemplary UTRs which may be utilized in the polynucleotides of the present invention. Shown in Table 1 is a listing of a 5′-untranslated region of the invention. Variants of 5′ UTRs may be utilized wherein one or more nucleotides are added or removed to the termini, including A, T, C or G.

TABLE 1
5′-Untranslated Regions

| 5′ UTR | Name/ | SEQ ID |
|---|---|---|
| Identifier | Description | NO. |
| 5UTR-001 | Upstream UTR | 3 |
| 5UTR-002 | Upstream UTR | 4 |
| 5UTR-003 | Upstream UTR | 5 |
| 5UTR-004 | Upstream UTR | 6 |
| 5UTR-005 | Upstream UTR | 7 |
| 5UTR-006 | Upstream UTR | 8 |
| 5UTR-007 | Upstream UTR | 9 |
| 5UTR-008 | Upstream UTR | 10 |
| 5UTR-009 | Upstream UTR | 11 |
| 5UTR-010 | Upstream UTR | 12 |
| 5UTR-011 | Upstream UTR | 13 |
| 5UTR-012 | Upstream UTR | 14 |
| 5UTR-013 | Upstream UTR | 15 |
| 5UTR-014 | Upstream UTR | 16 |
| 5UTR-015 | Upstream UTR | 17 |
| 5UTR-016 | Upstream UTR | 18 |
| 5UTR-017 | Upstream UTR | 19 |

[0187] Shown in Table 2 is a listing of 3′-untranslated regions of the invention. Variants of 3′ UTRs may be utilized wherein one or more nucleotides are added or removed to the termini, including A, T, C or G.

TABLE 2
3′-Untranslated Regions

| | | SEQ |
|---|---|---|
| 3′ UTR | | ID |
| Identifier | Name/Description | NO. |
| 3UTR-001 | Creatine Kinase | 20 |
| 3UTR-002 | Myoglobin | 21 |
| 3UTR-003 | α-actin | 22 |
| 3UTR-004 | Albumin | 23 |
| 3UTR-005 | α-globin | 24 |
| 3UTR-006 | G-CSF | 25 |
| 3UTR-007 | Col1a2; collagen, type I, alpha 2 | 26 |
| 3UTR-008 | Col6a2; collagen, type VI, alpha 2 | 27 |
| 3UTR-009 | RPN1; ribophorin I | 28 |
| 3UTR-010 | LRP1; low density lipoprotein | 29 |
| | receptor-related protein 1 | |
| 3UTR-011 | Nnt1; cardiotrophin-like cytokine | 30 |
| | factor 1 | |
| 3UTR-012 | Col6a1; collagen, type VI, alpha 1 | 31 |
| 3UTR-013 | Calr; calreticulin | 32 |
| 3UTR-014 | Col1a1; collagen, type I, alpha 1 | 33 |
| 3UTR-015 | Plod1; procollagen-lysine, 2- | 34 |
| | oxoglutarate 5-dioxygenase 1 | |
| 3UTR-016 | Nucb1; nucleobindin 1 | 35 |
| 3UTR-017 | α-globin | 36 |

### 5′ UTR and Translation Initiation

[0188] Natural 5′UTRs bear features which play roles in translation initiation. They harbor signatures like Kozak sequences which are commonly known to be involved in the process by which the ribosome initiates translation of many genes. Kozak sequences have the consensus CCR(A/G)CCAUGG, where R is a purine (adenine or guanine) three bases upstream of the start codon (AUG), which is followed by another ‘G’. 5′UTR also have been known to form secondary structures which are involved in elongation factor binding.

[0189] By engineering the features typically found in abundantly expressed genes of specific target organs, one can enhance the stability and protein production of the polynucleotides of the invention. For example, introduction of 5′ UTR of liver-expressed mRNA, such as albumin, serum amyloid A, Apolipoprotein A/B/E, transferrin, alpha fetoprotein, erythropoietin, or Factor VIII, could be used to enhance expression of a nucleic acid molecule, such as a polynucleotides, in hepatic cell lines or liver. Likewise, use of 5′ UTR from other tissue-specific mRNA to improve expression in that tissue is possible for muscle (MyoD, Myosin, Myoglobin, Myogenin, Herculin), for endothelial cells (Tie-1, CD36), for myeloid cells (C/EBP, AML1, G-CSF, GM-CSF, CD11b, MSR, Fr-1, i-NOS), for leukocytes (CD45, CD18), for adipose tissue (CD36, GLUT4, ACRP30, adiponectin) and for lung epithelial cells (SP-A/B/C/D). Untranslated regions useful in the design and manufacture of polynucleotides include, but are not limited, to those disclosed in co-pending, co-owned International Patent Publication No. WO2014164253 (Attorney Docket Number M42.20), the contents of which are incorporated herein by reference in its entirety.

[0190] Other non-UTR sequences may also be used as regions or subregions within the polynucleotides. For example, introns or portions of introns sequences may be incorporated into regions of the polynucleotides of the invention. Incorporation of intronic sequences may increase protein production as well as polynucleotide levels.

[0191] Combinations of features may be included in flanking regions and may be contained within other features. For example, the ORF may be flanked by a 5′ UTR which may contain a strong Kozak translational initiation signal and/or a 3′ UTR which may include an oligo(dT) sequence for templated addition of a poly-A tail. 5′UTR may comprise a first polynucleotide fragment and a second polynucleotide fragment from the same and/or different genes such as the 5′UTRs described in US Patent Application Publication No. 20100293625, herein incorporated by reference in its entirety.

[0192] Co-pending, co-owned International Patent Publication No. WO2014164253 (Attorney Docket Number M42.20) provides a listing of exemplary UTRs which may be utilized in the polynucleotide of the present invention as flanking regions. Variants of 5′ or 3′ UTRs may be utilized wherein one or more nucleotides are added or removed to the termini, including A, T, C or G.

[0193] It should be understood that any UTR from any gene may be incorporated into the regions of the polynucleotide. Furthermore, multiple wild-type UTRs of any known gene may be utilized. It is also within the scope of the present invention to provide artificial UTRs which are not variants of wild type regions. These UTRs or portions thereof may be placed in the same orientation as in the transcript from which they were selected or may be altered in orientation or location. Hence a 5′ or 3′ UTR may be inverted, shortened, lengthened, made with one or more other 5′ UTRs or 3′ UTRs. As used herein, the term “altered” as it relates to a UTR sequence, means that the UTR has been changed in some way in relation to a reference sequence. For example, a 3′ or 5′ UTR may be altered relative to a wild type or native UTR by the change in orientation or location as taught above or may be altered by the inclusion of additional nucleotides, deletion of nucleotides, swapping or transposition of nucleotides. Any of these changes producing an “altered” UTR (whether 3′ or 5′) comprise a variant UTR.

[0194] In one embodiment, a double, triple or quadruple UTR such as a 5′ or 3′ UTR may be used. As used herein, a “double” UTR is one in which two copies of the same UTR are encoded either in series or substantially in series. For example, a double beta-globin 3′ UTR may be used as described in US Patent publication 20100129877, the contents of which are incorporated herein by reference in its entirety.

[0195] It is also within the scope of the present invention to have patterned UTRs. As used herein “patterned UTRs” are those UTRs which reflect a repeating or alternating pattern, such as ABABAB or AABBAABBAABB or ABCABCABC or variants thereof repeated once, twice, or more than 3 times. In these patterns, each letter, A, B, or C represent a different UTR at the nucleotide level.

[0196] In one embodiment, flanking regions are selected from a family of transcripts whose proteins share a common function, structure, feature of property. For example, polypeptides of interest may belong to a family of proteins which are expressed in a particular cell, tissue or at some time during development. The UTRs from any of these genes may be swapped for any other UTR of the same or different family of proteins to create a new polynucleotide. As used herein, a “family of proteins” is used in the broadest sense to refer to a group of two or more polypeptides of interest which share at least one function, structure, feature, localization, origin, or expression pattern.

[0197] The untranslated region may also include translation enhancer elements (TEE). As a non-limiting example, the TEE may include those described in US Application No. 20090226470, herein incorporated by reference in its entirety, and those known in the art.

### 3′ UTR and the AU Rich Elements

[0198] Natural or wild type 3′ UTRs are known to have stretches of Adenosines and Uridines embedded in them. These AU rich signatures are particularly prevalent in genes with high rates of turnover. Based on their sequence features and functional properties, the AU rich elements (AREs) can be separated into three classes (Chen et al, 1995): Class I AREs contain several dispersed copies of an AUUUA motif within U-rich regions. C-Myc and MyoD contain class I AREs. Class II AREs possess two or more overlapping UUAUUUA(U/A)(U/A) nonamers. Molecules containing this type of AREs include GM-CSF and TNF-α. Class III ARES are less well defined. These U rich regions do not contain an AUUUA motif. c-Jun and Myogenin are two well-studied examples of this class. Most proteins binding to the AREs are known to destabilize the messenger, whereas members of the ELAV family, most notably HuR, have been documented to increase the stability of mRNA. HuR binds to AREs of all the three classes. Engineering the HuR specific binding sites into the 3′ UTR of nucleic acid molecules will lead to HuR binding and thus, stabilization of the message in vivo.

[0199] Introduction, removal or modification of 3′ UTR AU rich elements (AREs) can be used to modulate the stability of polynucleotides of the invention. When engineering specific polynucleotides, one or more copies of an ARE can be introduced to make polynucleotides of the invention less stable and thereby curtail translation and decrease production of the resultant protein. Likewise, AREs can be identified and removed or mutated to increase the intracellular stability and thus increase translation and production of the resultant protein. Transfection experiments can be conducted in relevant cell lines, using polynucleotides of the invention and protein production can be assayed at various time points post-transfection. For example, cells can be transfected with different ARE-engineering molecules and by using an ELISA kit to the relevant protein and assaying protein produced at 6 hour, 12 hour, 24 hour, 48 hour, and 7 days post-transfection.

microRNA Binding Sites

[0200] microRNAs (or miRNA) are 19-25 nucleotide long noncoding RNAs that bind to the 3′UTR of nucleic acid molecules and down-regulate gene expression either by reducing nucleic acid molecule stability or by inhibiting translation. The polynucleotides of the invention may comprise one or more microRNA target sequences, microRNA sequences, or microRNA seeds. Such sequences may correspond to any known microRNA such as those taught in US Publication US2005/0261218, US Publication US2005/0059005, US Patent Publication No. 20140200261 (Attorney Docket No. M037.10), US Patent Publication No. 20140147454 (Attorney Docket No. M039.11), International Patent Publication No. WO2014113089 (Attorney Docket No. M037.20), and International Patent Publication No. WO2014081507 (Attorney Docket No. M039.21), the contents of each of which are incorporated herein by reference in their entirety.

[0201] A microRNA sequence comprises a “seed” region, i.e., a sequence in the region of positions 2-8 of the mature microRNA, which sequence has perfect Watson-Crick complementarity to the miRNA target sequence. A microRNA seed may comprise positions 2-8 or 2-7 of the mature microRNA. In some embodiments, a microRNA seed may comprise 7 nucleotides (e.g., nucleotides 2-8 of the mature microRNA), wherein the seed-complementary site in the corresponding miRNA target is flanked by an adenine (A) opposed to microRNA position 1. In some embodiments, a microRNA seed may comprise 6 nucleotides (e.g., nucleotides 2-7 of the mature microRNA), wherein the seed-complementary site in the corresponding miRNA target is flanked by an adenine (A) opposed to microRNA position 1. See for example, Grimson A, Farh K K, Johnston W K, Garrett-Engele P, Lim L P, Bartel D P; Mol Cell. 2007 Jul. 6; 27(1):91-105; each of which is herein incorporated by reference in their entirety. The bases of the microRNA seed have complete complementarity with the target sequence. By engineering microRNA target sequences into the polynucleotides (e.g., in a 3′UTR like region or other region) of the invention one can target the molecule for degradation or reduced translation, provided the microRNA in question is available. This process will reduce the hazard of off target effects upon nucleic acid molecule delivery. Identification of microRNA, microRNA target regions, and their expression patterns and role in biology have been reported (Bonauer et al., Curr Drug Targets 2010 11:943-949; Anand and Cheresh Curr Opin Hematol 2011 18:171-176; Contreras and Rao Leukemia 2012 26:404-413 (2011 Dec. 20. doi: 10.1038/leu.2011.356); Bartel Cell 2009 136:215-233; Landgraf et al, Cell, 2007 129:1401-1414; each of which is herein incorporated by reference in its entirety).

[0202] For example, if the nucleic acid molecule is an mRNA and is not intended to be delivered to the liver but ends up there, then miR-122, a microRNA abundant in liver, can inhibit the expression of the gene of interest if one or multiple target sites of miR-122 are engineered into the 3′ UTR region of the polynucleotides. Introduction of one or multiple binding sites for different microRNA can be engineered to further decrease the longevity, stability, and protein translation of polynucleotides.

[0203] As used herein, the term “microRNA site” refers to a microRNA target site or a microRNA recognition site, or any nucleotide sequence to which a microRNA binds or associates. It should be understood that “binding” may follow traditional Watson-Crick hybridization rules or may reflect any stable association of the microRNA with the target sequence at or adjacent to the microRNA site.

[0204] Conversely, for the purposes of the polynucleotides of the present invention, microRNA binding sites can be engineered out of (i.e. removed from) sequences in which they occur, e.g., in order to increase protein expression in specific tissues. For example, miR-122 binding sites may be removed to improve protein expression in the liver. Regulation of expression in multiple tissues can be accomplished through introduction or removal or one or several microRNA binding sites.

[0205] Examples of tissues where microRNA are known to regulate mRNA, and thereby protein expression, include, but are not limited to, liver (miR-122), muscle (miR-133, miR-206, miR-208), endothelial cells (miR-17-92, miR-126), myeloid cells (miR-142-3p, miR-142-5p, miR-16, miR-21, miR-223, miR-24, miR-27), adipose tissue (let-7, miR-30c), heart (miR-1d, miR-149), kidney (miR-192, miR-194, miR-204), and lung epithelial cells (let-7, miR-133, miR-126). MicroRNA can also regulate complex biological processes such as angiogenesis (miR-132) (Anand and Cheresh Curr Opin Hematol 2011 18:171-176; herein incorporated by reference in its entirety).

[0206] Expression profiles, microRNA and cell lines useful in the present invention include those taught in, for example, International Patent Publication Nos. WO2014081507 (Attorney Docket Number M39) and WO2014113089 (Attorney Docket Number M37) each filed Jul. 23, 2013, the contents of which are incorporated by reference in their entirety.

[0207] In the polynucleotides of the present invention, binding sites for microRNAs that are involved in such processes may be removed or introduced, in order to tailor the expression of the polynucleotides expression to biologically relevant cell types or to the context of relevant biological processes. A listing of microRNA, miR sequences and miR binding sites is listed in Table 9 of U.S. Provisional Application No. 61/753,661 filed Jan. 17, 2013, in Table 9 of U.S. Provisional Application No. 61/754,159 filed Jan. 18, 2013, and in Table 7 of U.S. Provisional Application No. 61/758,921 filed Jan. 31, 2013, each of which are herein incorporated by reference in their entireties.

[0208] Examples of use of microRNA to drive tissue or disease-specific gene expression are listed (Getner and Naldini, Tissue Antigens. 2012, 80:393-403; herein incorporated by reference in its entirety). In addition, microRNA seed sites can be incorporated into mRNA to decrease expression in certain cells which results in a biological improvement. An example of this is incorporation of miR-142 sites into a UGT1A1-expressing lentiviral vector. The presence of miR-142 seed sites reduced expression in hematopoietic cells, and as a consequence reduced expression in antigen-presenting cells, leading to the absence of an immune response against the virally expressed UGT1A1 (Schmitt et al., Gastroenterology 2010; 139:999-1007; Gonzalez-Asequinolaza et al. Gastroenterology 2010, 139:726-729; both herein incorporated by reference in its entirety). Incorporation of miR-142 sites into modified mRNA could not only reduce expression of the encoded protein in hematopoietic cells, but could also reduce or abolish immune responses to the mRNA-encoded protein. Incorporation of miR-142 seed sites (one or multiple) into mRNA would be important in the case of treatment of patients with complete protein deficiencies (UGT1A1 type I, LDLR-deficient patients, CRIM-negative Pompe patients, etc.).

[0209] Lastly, through an understanding of the expression patterns of microRNA in different cell types, polynucleotides can be engineered for more targeted expression in specific cell types or only under specific biological conditions. Through introduction of tissue-specific microRNA binding sites, polynucleotides could be designed that would be optimal for protein expression in a tissue or in the context of a biological condition.

[0210] Transfection experiments can be conducted in relevant cell lines, using engineered polynucleotides and protein production can be assayed at various time points post-transfection. For example, cells can be transfected with different microRNA binding site-engineering polynucleotides and by using an ELISA kit to the relevant protein and assaying protein produced at 6 hour, 12 hour, 24 hour, 48 hour, 72 hour and 7 days post-transfection. In vivo experiments can also be conducted using microRNA-binding site-engineered molecules to examine changes in tissue-specific expression of formulated polynucleotides.

[0211] In one embodiment, a polynucleotide encoding a tolerogenic polypeptide of interest may comprise at least one terminal modification such as, but not limited to, the terminal modifications described in US Patent Publication No. 20140147454 (Attorney Docket No. M039.11) and International Patent Publication No. WO2014081507 (Attorney Docket No. M039.21), the contents of each of which are incorporated herein by reference in their entirety. As a non-limiting example, the terminal modification may be at least one miR-122 sequence or fragment such as at least one miR-122 binding site in the 3′UTR of the polynucleotide. The polynucleotide may be formulated in any of the formulations described herein such as, but not limited to, a lipid nanoparticle to target translation of the polynucleotide in myeloid cells. The size of a lipid nanoparticle comprising the polynucleotide may be optimized to specifically target APCs or DCs and/or the nanoparticles may comprise at least one targeting epitope to target APCs or DCs.

### Regions Having a 5′ Cap

[0212] The 5′ cap structure of a natural mRNA is involved in nuclear export, increasing mRNA stability and binds the mRNA Cap Binding Protein (CBP), which is responsible for mRNA stability in the cell and translation competency through the association of CBP with poly(A) binding protein to form the mature cyclic mRNA species. The cap further assists the removal of 5′ proximal introns removal during mRNA splicing.

[0213] Endogenous mRNA molecules may be 5′-end capped generating a 5′-ppp-5′-triphosphate linkage between a terminal guanosine cap residue and the 5′-terminal transcribed sense nucleotide of the mRNA molecule. This 5′-guanylate cap may then be methylated to generate an N7-methyl-guanylate residue. The ribose sugars of the terminal and/or anteterminal transcribed nucleotides of the 5′ end of the mRNA may optionally also be 2′-O-methylated. 5′-decapping through hydrolysis and cleavage of the guanylate cap structure may target a nucleic acid molecule, such as an mRNA molecule, for degradation.

[0214] In some embodiments, polynucleotides may be designed to incorporate a cap moiety. Modifications to the polynucleotides of the present invention may generate a non-hydrolyzable cap structure preventing decapping and thus increasing mRNA half-life. Because cap structure hydrolysis requires cleavage of 5′-ppp-5′ phosphorodiester linkages, modified nucleotides may be used during the capping reaction. For example, a Vaccinia Capping Enzyme from New England Biolabs (Ipswich, Mass.) may be used with α-thio-guanosine nucleotides according to the manufacturer's instructions to create a phosphorothioate linkage in the 5′-ppp-5′ cap. Additional modified guanosine nucleotides may be used such as α-methyl-phosphonate and seleno-phosphate nucleotides.

[0215] Additional modifications include, but are not limited to, 2′-O-methylation of the ribose sugars of 5′-terminal and/or 5′-anteterminal nucleotides of the polynucleotide (as mentioned above) on the 2′-hydroxyl group of the sugar ring. Multiple distinct 5′-cap structures can be used to generate the 5′-cap of a nucleic acid molecule, such as a polynucleotide which functions as an mRNA molecule.

[0216] Cap analogs, which herein are also referred to as synthetic cap analogs, chemical caps, chemical cap analogs, or structural or functional cap analogs, differ from natural (i.e. endogenous, wild-type or physiological) 5′-caps in their chemical structure, while retaining cap function. Cap analogs may be chemically (i.e. non-enzymatically) or enzymatically synthesized and/or linked to the polynucleotides of the invention.

[0217] For example, the Anti-Reverse Cap Analog (ARCA) cap contains two guanines linked by a 5′-5′-triphosphate group, wherein one guanine contains an N7 methyl group as well as a 3′-O-methyl group (i.e., N7,3′-O-dimethyl-guanosine-5′-triphosphate-5′-guanosine (m⁷G-3′mppp-G; which may equivalently be designated 3′O-Me-m7G(5′)ppp(5′)G). The 3′-O atom of the other, unmodified, guanine becomes linked to the 5′-terminal nucleotide of the capped polynucleotide. The N7- and 3′-O-methlyated guanine provides the terminal moiety of the capped polynucleotide.

[0218] Another exemplary cap is mCAP, which is similar to ARCA but has a 2′-O-methyl group on guanosine (i.e., N7,2′-O-dimethyl-guanosine-5′-triphosphate-5′-guanosine, m⁷Gm-ppp-G).

[0219] In one embodiment, the cap is a dinucleotide cap analog. As a non-limiting example, the dinucleotide cap analog may be modified at different phosphate positions with a boranophosphate group or a phophoroselenoate group such as the dinucleotide cap analogs described in U.S. Pat. No. 8,519,110, the contents of which are herein incorporated by reference in its entirety.

[0220] In another embodiment, the cap is a cap analog is a N7-(4-chlorophenoxyethyl) substituted dinucleotide form of a cap analog known in the art and/or described herein. Non-limiting examples of a N7-(4-chlorophenoxyethyl) substituted dinucleotide form of a cap analog include a N7-(4-chlorophenoxyethyl)-G(5′)ppp(5′)G and a N7-(4-chlorophenoxyethyl)-m^{3-O}G(5′)ppp(5′)G cap analog (See e.g., the various cap analogs and the methods of synthesizing cap analogs described in Kore et al. Bioorganic & Medicinal Chemistry 2013 21:4570-4574; the contents of which are herein incorporated by reference in its entirety). In another embodiment, a cap analog of the present invention is a 4-chloro/bromophenoxyethyl analog.

[0221] While cap analogs allow for the concomitant capping of a polynucleotide or a region thereof, in an in vitro transcription reaction, up to 20% of transcripts can remain uncapped. This, as well as the structural differences of a cap analog from an endogenous 5′-cap structures of nucleic acids produced by the endogenous, cellular transcription machinery, may lead to reduced translational competency and reduced cellular stability.

[0222] Polynucleotides of the invention may also be capped post-manufacture (whether IVT or chemical synthesis), using enzymes, in order to generate more authentic 5′-cap structures. As used herein, the phrase “more authentic” refers to a feature that closely mirrors or mimics, either structurally or functionally, an endogenous or wild type feature. That is, a “more authentic” feature is better representative of an endogenous, wild-type, natural or physiological cellular function and/or structure as compared to synthetic features or analogs, etc., of the prior art, or which outperforms the corresponding endogenous, wild-type, natural or physiological feature in one or more respects. Non-limiting examples of more authentic 5′cap structures of the present invention are those which, among other things, have enhanced binding of cap binding proteins, increased half-life, reduced susceptibility to 5′ endonucleases and/or reduced 5′decapping, as compared to synthetic 5′cap structures known in the art (or to a wild-type, natural or physiological 5′cap structure). For example, recombinant Vaccinia Virus Capping Enzyme and recombinant 2′-O-methyltransferase enzyme can create a canonical 5′-5′-triphosphate linkage between the 5′-terminal nucleotide of a polynucleotide and a guanine cap nucleotide wherein the cap guanine contains an N7 methylation and the 5′-terminal nucleotide of the mRNA contains a 2′-O-methyl. Such a structure is termed the Cap1 structure. This cap results in a higher translational-competency and cellular stability and a reduced activation of cellular pro-inflammatory cytokines, as compared, e.g., to other 5′cap analog structures known in the art. Cap structures include, but are not limited to, 7mG(5′)ppp(5′)N,pN2p (cap 0), 7mG(5′)ppp(5′)NlmpNp (cap 1), and 7mG(5′)-ppp(5′)NlmpN2mp (cap 2).

[0223] As a non-limiting example, capping chimeric polynucleotides post-manufacture may be more efficient as nearly 100% of the chimeric polynucleotides may be capped. This is in contrast to ˜80% when a cap analog is linked to a chimeric polynucleotide in the course of an in vitro transcription reaction.

[0224] According to the present invention, 5′ terminal caps may include endogenous caps or cap analogs. According to the present invention, a 5′ terminal cap may comprise a guanine analog. Useful guanine analogs include, but are not limited to, inosine, N1-methyl-guanosine, 2′fluoro-guanosine, 7-deaza-guanosine, 8-oxo-guanosine, 2-amino-guanosine, LNA-guanosine, and 2-azido-guanosine.

### Viral Sequences

[0225] Additional viral sequences such as, but not limited to, the translation enhancer sequence of the barley yellow dwarf virus (BYDV-PAV), the Jaagsiekte sheep retrovirus (JSRV) and/or the Enzootic nasal tumor virus (See e.g., International Pub. No. WO2012129648; herein incorporated by reference in its entirety) can be engineered and inserted in the polynucleotides of the invention and can stimulate the translation of the construct in vitro and in vivo. Transfection experiments can be conducted in relevant cell lines at and protein production can be assayed by ELISA at 12 hr, 24 hr, 48 hr, 72 hr and day 7 post-transfection.

### IRES Sequences

[0226] Further, provided are polynucleotides which may contain an internal ribosome entry site (IRES). First identified as a feature Picorna virus RNA, IRES plays an important role in initiating protein synthesis in absence of the 5′ cap structure. An IRES may act as the sole ribosome binding site, or may serve as one of multiple ribosome binding sites of an mRNA. Polynucleotides containing more than one functional ribosome binding site may encode several peptides or polypeptides that are translated independently by the ribosomes (“multicistronic nucleic acid molecules”). When polynucleotides are provided with an IRES, further optionally provided is a second translatable region. Examples of IRES sequences that can be used according to the invention include without limitation, those from picornaviruses (e.g. FMDV), pest viruses (CFFV), polio viruses (PV), encephalomyocarditis viruses (ECMV), foot-and-mouth disease viruses (FMDV), hepatitis C viruses (HCV), classical swine fever viruses (CSFV), murine leukemia virus (MLV), simian immune deficiency viruses (SIV) or cricket paralysis viruses (CrPV).

### Poly-A Tails

[0227] During RNA processing, a long chain of adenine nucleotides (poly-A tail) may be added to a polynucleotide such as an mRNA molecule in order to increase stability. Immediately after transcription, the 3′ end of the transcript may be cleaved to free a 3′ hydroxyl. Then poly-A polymerase adds a chain of adenine nucleotides to the RNA. The process, called polyadenylation, adds a poly-A tail that can be between, for example, approximately 80 to approximately 250 residues long, including approximately 80, 90, 100, 110, 120, 130, 140, 150, 160, 170, 180, 190, 200, 210, 220, 230, 240 or 250 residues long.

[0228] PolyA tails may also be added after the construct is exported from the nucleus.

[0229] According to the present invention, terminal groups on the poly A tail may be incorporated for stabilization. Polynucleotides of the present invention may include des-3′ hydroxyl tails. They may also include structural moieties or 2′-Omethyl modifications as taught by Junjie Li, et al. (Current Biology, Vol. 15, 1501-1507, Aug. 23, 2005, the contents of which are incorporated herein by reference in its entirety).

[0230] The polynucleotides of the present invention may be designed to encode transcripts with alternative polyA tail structures including histone mRNA. According to Norbury, “Terminal uridylation has also been detected on human replication-dependent histone mRNAs. The turnover of these mRNAs is thought to be important for the prevention of potentially toxic histone accumulation following the completion or inhibition of chromosomal DNA replication. These mRNAs are distinguished by their lack of a 3′ poly(A) tail, the function of which is instead assumed by a stable stem-loop structure and its cognate stem-loop binding protein (SLBP); the latter carries out the same functions as those of PABP on polyadenylated mRNAs” (Norbury, “Cytoplasmic RNA: a case of the tail wagging the dog,” Nature Reviews Molecular Cell Biology; AOP, published online 29 Aug. 2013; doi:10.1038/nrm3645) the contents of which are incorporated herein by reference in its entirety.

[0231] Unique poly-A tail lengths provide certain advantages to the polynucleotides of the present invention.

[0232] Generally, the length of a poly-A tail, when present, is greater than 30 nucleotides in length. In another embodiment, the poly-A tail is greater than 35 nucleotides in length (e.g., at least or greater than about 35, 40, 45, 50, 55, 60, 70, 80, 90, 100, 120, 140, 160, 180, 200, 250, 300, 350, 400, 450, 500, 600, 700, 800, 900, 1,000, 1,100, 1,200, 1,300, 1,400, 1,500, 1,600, 1,700, 1,800, 1,900, 2,000, 2,500, and 3,000 nucleotides). In some embodiments, the polynucleotide or region thereof includes from about 30 to about 3,000 nucleotides (e.g., from 30 to 50, from 30 to 100, from 30 to 250, from 30 to 500, from 30 to 750, from 30 to 1,000, from 30 to 1,500, from 30 to 2,000, from 30 to 2,500, from 50 to 100, from 50 to 250, from 50 to 500, from 50 to 750, from 50 to 1,000, from 50 to 1,500, from 50 to 2,000, from 50 to 2,500, from 50 to 3,000, from 100 to 500, from 100 to 750, from 100 to 1,000, from 100 to 1,500, from 100 to 2,000, from 100 to 2,500, from 100 to 3,000, from 500 to 750, from 500 to 1,000, from 500 to 1,500, from 500 to 2,000, from 500 to 2,500, from 500 to 3,000, from 1,000 to 1,500, from 1,000 to 2,000, from 1,000 to 2,500, from 1,000 to 3,000, from 1,500 to 2,000, from 1,500 to 2,500, from 1,500 to 3,000, from 2,000 to 3,000, from 2,000 to 2,500, and from 2,500 to 3,000).

[0233] In one embodiment, the poly-A tail is designed relative to the length of the overall polynucleotide or the length of a particular region of the polynucleotide. This design may be based on the length of a coding region, the length of a particular feature or region or based on the length of the ultimate product expressed from the polynucleotides.

[0234] In this context the poly-A tail may be 10, 20, 30, 40, 50, 60, 70, 80, 90, or 100% greater in length than the polynucleotide or feature thereof. The poly-A tail may also be designed as a fraction of the polynucleotides to which it belongs. In this context, the poly-A tail may be 10, 20, 30, 40, 50, 60, 70, 80, or 90% or more of the total length of the construct, a construct region or the total length of the construct minus the poly-A tail. Further, engineered binding sites and conjugation of polynucleotides for Poly-A binding protein may enhance expression.

[0235] Additionally, multiple distinct polynucleotides may be linked together via the PABP (Poly-A binding protein) through the 3′-end using modified nucleotides at the 3′-terminus of the poly-A tail. Transfection experiments can be conducted in relevant cell lines at and protein production can be assayed by ELISA at 12 hr, 24 hr, 48 hr, 72 hr and day 7 post-transfection.

[0236] In one embodiment, the polynucleotides of the present invention are designed to include a polyA-G Quartet region. The G-quartet is a cyclic hydrogen bonded array of four guanine nucleotides that can be formed by G-rich sequences in both DNA and RNA. In this embodiment, the G-quartet is incorporated at the end of the poly-A tail. The resultant polynucleotide is assayed for stability, protein production and other parameters including half-life at various time points. It has been discovered that the polyA-G quartet results in protein production from an mRNA equivalent to at least 75% of that seen using a poly-A tail of 120 nucleotides alone.

### Start Codon Region

[0237] In some embodiments, the polynucleotides of the present invention may have regions that are analogous to or function like a start codon region.

[0238] In one embodiment, the translation of a polynucleotide may initiate on a codon which is not the start codon AUG. Translation of the polynucleotide may initiate on an alternative start codon such as, but not limited to, ACG, AGG, AAG, CTG/CUG, GTG/GUG, ATA/AUA, ATT/AUU, TTG/UUG (see Touriol et al. Biology of the Cell 95 (2003) 169-178 and Matsuda and Mauro PLoS ONE, 2010 5:11; the contents of each of which are herein incorporated by reference in its entirety). As a non-limiting example, the translation of a polynucleotide begins on the alternative start codon ACG. As another non-limiting example, polynucleotide translation begins on the alternative start codon CTG or CUG. As yet another non-limiting example, the translation of a polynucleotide begins on the alternative start codon GTG or GUG.

[0239] Nucleotides flanking a codon that initiates translation such as, but not limited to, a start codon or an alternative start codon, are known to affect the translation efficiency, the length and/or the structure of the polynucleotide. (See e.g., Matsuda and Mauro PLoS ONE, 2010 5:11; the contents of which are herein incorporated by reference in its entirety). Masking any of the nucleotides flanking a codon that initiates translation may be used to alter the position of translation initiation, translation efficiency, length and/or structure of a polynucleotide.

[0240] In one embodiment, a masking agent may be used near the start codon or alternative start codon in order to mask or hide the codon to reduce the probability of translation initiation at the masked start codon or alternative start codon. Non-limiting examples of masking agents include antisense locked nucleic acids (LNA) polynucleotides and exon junction complexes (EJCs) (See e.g., Matsuda and Mauro describing masking agents LNA polynucleotides and EJCs (PLoS ONE, 2010 5:11); the contents of which are herein incorporated by reference in its entirety).

[0241] In another embodiment, a masking agent may be used to mask a start codon of a polynucleotide in order to increase the likelihood that translation will initiate on an alternative start codon.

[0242] In one embodiment, a masking agent may be used to mask a first start codon or alternative start codon in order to increase the chance that translation will initiate on a start codon or alternative start codon downstream to the masked start codon or alternative start codon.

[0243] In one embodiment, a start codon or alternative start codon may be located within a perfect complement for a miR binding site. The perfect complement of a miR binding site may help control the translation, length and/or structure of the polynucleotide similar to a masking agent. As a non-limiting example, the start codon or alternative start codon may be located in the middle of a perfect complement for a miR-122 binding site. The start codon or alternative start codon may be located after the first nucleotide, second nucleotide, third nucleotide, fourth nucleotide, fifth nucleotide, sixth nucleotide, seventh nucleotide, eighth nucleotide, ninth nucleotide, tenth nucleotide, eleventh nucleotide, twelfth nucleotide, thirteenth nucleotide, fourteenth nucleotide, fifteenth nucleotide, sixteenth nucleotide, seventeenth nucleotide, eighteenth nucleotide, nineteenth nucleotide, twentieth nucleotide or twenty-first nucleotide.

[0244] In another embodiment, the start codon of a polynucleotide may be removed from the polynucleotide sequence in order to have the translation of the polynucleotide begin on a codon which is not the start codon. Translation of the polynucleotide may begin on the codon following the removed start codon or on a downstream start codon or an alternative start codon. In a non-limiting example, the start codon ATG or AUG is removed as the first 3 nucleotides of the polynucleotide sequence in order to have translation initiate on a downstream start codon or alternative start codon. The polynucleotide sequence where the start codon was removed may further comprise at least one masking agent for the downstream start codon and/or alternative start codons in order to control or attempt to control the initiation of translation, the length of the polynucleotide and/or the structure of the polynucleotide.

### Stop Codon Region

[0245] In one embodiment, the polynucleotides of the present invention may include at least two stop codons before the 3′ untranslated region (UTR). The stop codon may be selected from TGA, TAA and TAG. In one embodiment, the polynucleotides of the present invention include the stop codon TGA and one additional stop codon. In a further embodiment the addition stop codon may be TAA. In another embodiment, the polynucleotides of the present invention include three stop codons.

### Signal Sequences

[0246] The polynucleotides may also encode additional features which facilitate trafficking of the polypeptides to therapeutically relevant sites. One such feature which aids in protein trafficking is the signal sequence. As used herein, a “signal sequence” or “signal peptide” is a polynucleotide or polypeptide, respectively, which is from about 9 to 200 nucleotides (3-60 amino acids) in length which is incorporated at the 5′ (or N-terminus) of the coding region or polypeptide encoded, respectively. Addition of these sequences result in trafficking of the encoded polypeptide to the endoplasmic reticulum through one or more secretory pathways. Some signal peptides are cleaved from the protein by signal peptidase after the proteins are transported.

[0247] Additional signal sequences which may be utilized in the present invention include those taught in, for example, databases such as those found at http://www.signalpeptide.de/ or http://proline.bic.nus.edu.sg/spdb/. Those described in U.S. Pat. Nos. 8,124,379; 7,413,875 and 7,385,034 are also within the scope of the invention and the contents of each are incorporated herein by reference in their entirety.

### Tolerogenic Molecules Encoded by Polynucleotides

[0248] According to the present invention, the polynucleotides may encode at least one polypeptide of interest. Certain tolerogenic molecules of the present invention are listed in Table 3. Shown in Table 3, in addition to the name and description of the gene encoding the polypeptide of interest, where applicable, (Tolerogenic Molecule Description) are the ENSEMBL Transcript ID (ENST), the ENSEMBL Protein ID (ENSP) and the optimized open reading frame sequence ID (Optimized ORF SEQ ID).

[0249] For any particular gene there may exist one or more variants or isoforms. Non-limiting examples of these variants or isoforms, if known, are shown in the table as well. It will be appreciated by those of skill in the art that disclosed in the Table are potential flanking regions. These are encoded in each ENST transcript either to the 5′ (upstream) or 3′ (downstream) of the ORF or coding region. The coding region is definitively and specifically disclosed by teaching the ENSP and/or the Protein Sequence. Consequently, the sequences taught flanking that encode the protein are considered regions that flank the ORF or coding region. It is also possible to further characterize the 5′ and 3′ regions that flank the ORF or coding region by utilizing one or more available databases or algorithms. Databases have annotated the features contained in the regions that flank the ORF or coding region of the ENST transcripts and these are available in the art. Also described in Table 3, if known are optimized transcript and/or ORF sequences. In Table 3, “N/A” means not applicable.

TABLE 3
Tolerogenic Molecules

| | | | | | | Optimized | |
|---|---|---|---|---|---|---|---|
| | | | Protein | | Trans | Trans | Optimized |
| | | | SEQ ID | | SEQ ID | SEQ ID | ORF SEQ |
| No. | Tolerogenic Molecule Description | ENSP | NO | ENST | NO | NO | ID NO |
| 1 | CD274 molecule | 370985 | 37 | 381573 | 172 | | 220, 259, 298, |
| | | | | | | | 337, 376 |
| 2 | CD274 molecule | 370989 | 38 | 381577 | 173 | | 221, 260, 299, |
| | | | | | | | 338, 377 |
| 3 | CD40 molecule, TNF receptor | 361350 | 39 | 372276 | 174 | | 222, 261, 300, |
| | superfamily member 5 | | | | | | 339, 378 |
| 4 | CD40 molecule, TNF receptor | 361352 | 40 | 372278 | 175 | | 223, 262, 301, |
| | superfamily member 5 | | | | | | 340, 379 |
| 5 | CD40 molecule, TNF receptor | 361359 | 41 | 372285 | 176 | | 224, 263, 302, |
| | superfamily member 5 | | | | | | 341, 380 |
| 6 | CD40 ligand | 359662 | 42 | 370628 | 177 | | 225, 264, 303, |
| | | | | | | | 342, 381 |
| 7 | CD40 ligand | 359663 | 43 | 370629 | 178 | | 226, 265, 304, |
| | | | | | | | 343, 382 |
| 8 | Anti-CD40L domain antibody (dAb) | N/A | 44 | | | | |
| 9 | Mutated IgG-4 chain C region | N/A | 45 | | | | |
| 10 | Membrane bound IgM CH4 of IgM | N/A | 46 | | | | |
| 11 | Membrane bound IgG-4 chain with a | N/A | 47 | | | | |
| | VK signal peptide, a FLAG tag, an | | | | | | |
| | anti-CD40L dAb and an immunoglobin | | | | | | |
| | mu chain | | | | | | |
| 12 | Secreted IgG-4 chain with a VK signal | N/A | 48 | | | | |
| | peptide, a FLAG tag and an anti-CD40L dAb | | | | | | |
| 13 | lymphocyte antigen 75 | 263636 | 49 | 263636 | 179 | | 227, 266, 305, |
| | | | | | | | 344, 383 |
| 14 | lymphocyte antigen 75 | 451446 | 50 | 553424 | 180 | | 228, 267, 306, |
| | | | | | | | 345, 384 |
| 15 | lymphocyte antigen 75 | 451511 | 51 | 554112 | 181 | | 229, 268, 307, |
| | | | | | | | 346, 385 |
| 16 | CD52 molecule | 363330 | 52 | 374213 | 182 | | 230, 269, 308, |
| | | | | | | | 347, 386 |
| 17 | fms-related tyrosine kinase 3 ligand | 204637 | 53 | 204637 | 183 | | 231, 270, 309, |
| | | | | | | | 348, 387, 415, |
| | | | | | | | 420 |
| 18 | fms-related tyrosine kinase 3 ligand | 341305 | 54 | 344019 | 184 | | 232, 271, 310, |
| | | | | | | | 349, 388, 416, |
| | | | | | | | 421 |
| 19 | fms-related tyrosine kinase 3 ligand | 469613 | 55 | 594009 | 185 | | 233, 272, 311, |
| | | | | | | | 350, 389 |
| 20 | lectin, galactoside-binding, soluble, 1 | 215909 | 56 | 215909 | 186 | | 234, 273, 312, |
| | | | | | | | 351, 390 |
| 21 | leucine rich repeat containing 32 | 260061 | 57 | 260061 | 187 | | 235, 274, 313, |
| | | | | | | | 352, 391 |
| 22 | leucine rich repeat containing 32 | 385766 | 58 | 404995 | 188 | | 236, 275, 314, |
| | | | | | | | 353, 392 |
| 23 | leucine rich repeat containing 32 | 384126 | 59 | 407242 | 189 | | 237, 276, 315, |
| | | | | | | | 354, 393 |
| 24 | leucine rich repeat containing 32 | 413331 | 60 | 421973 | 190 | | 238, 277, 316, |
| | | | | | | | 355, 394 |
| 25 | indoleamine 2,3-dioxygenase 1 | 430950 | 61 | 518237 | 191 | | 239, 278, 317, |
| | | | | | | | 356, 395 |
| 26 | indoleamine 2,3-dioxygenase 1 | 429297 | 62 | 518804 | 192 | | 240, 279, 318, |
| | | | | | | | 357, 396 |
| 27 | indoleamine 2,3-dioxygenase 1 | 428716 | 63 | 519154 | 193 | | 241, 280, 319, |
| | | | | | | | 358, 397 |
| 28 | indoleamine 2,3-dioxygenase 1 | 430505 | 64 | 522495 | 194 | | 242, 281, 320, |
| | | | | | | | 359, 398 |
| 29 | indoleamine 2,3-dioxygenase 1 | 429933 | 65 | 522840 | 195 | | 243, 282, 321, |
| | | | | | | | 360, 399 |
| 30 | indoleamine 2,3-dioxygenase 2 | 426447 | 66 | 389060 | 196 | | 244, 283, 322, |
| | | | | | | | 361, 400 |
| 31 | indoleamine 2,3-dioxygenase 2 | 443432 | 67 | 502986 | 197 | | 245, 284, 323, |
| | | | | | | | 362, 401 |
| 32 | interleukin 10 | 412237 | 68 | 423557 | 198 | | 213, 246, 285, |
| | | | | | | | 324, 363, 402, |
| | | | | | | | 425-511 |
| 33 | interleukin 10 | | | | | 216 | |
| 34 | interleukin 12A (natural killer cell | 303231 | 69 | 305579 | 199 | | 247, 286, 325, |
| | stimulatory factor 1, cytotoxic | | | | | | 364, 403, 417, |
| | lymphocyte maturation factor 1, p35) | | | | | | 422 |
| 35 | interleukin 12A (natural killer cell | 419046 | 70 | 466512 | 200 | | 248, 287, 326, |
| | stimulatory factor 1, cytotoxic | | | | | | 365, 404, 418, |
| | lymphocyte maturation factor 1, p35) | | | | | | 423 |
| 36 | interleukin 12A (natural killer cell | 420184 | 71 | 480787 | 201 | | 249, 288, 327, |
| | stimulatory factor 1, cytotoxic | | | | | | 366, 405, 419, |
| | lymphocyte maturation factor 1, p35) | | | | | | 424 |
| 37 | interleukin 12A | N/A | 72 | | | | |
| 38 | Epstein-Barr virus induced 3 | 221847 | 73 | 221847 | 202 | | 250, 289, 328, |
| | | | | | | | 367, 406 |
| 39 | Epstein-Barr virus induced 3 | N/A | 74 | | | | |
| 40 | IL12-alpha, 2A peptide, EBI3 construct with | N/A | 75 | | | | |
| | a sequence of 6 histidines | | | | | | |
| 41 | IL12-alpha, GS linker, EBI3 construct with | N/A | 76 | | | | |
| | a FLAG tag | | | | | | |
| 42 | EBI3, GS linker, IL12-alpha and an Fc region | N/A | 77 | | | | |
| 43 | interleukin 37 | 263326 | 78 | 263326 | 203 | | 251, 290, 329, |
| | | | | | | | 368, 407 |
| 44 | interleukin 37 | 309883 | 79 | 311328 | 204 | | 252, 291, 330, |
| | | | | | | | 369, 408 |
| 45 | interleukin 37 | 263328 | 80 | 349806 | 205 | | 253, 292, 331, |
| | | | | | | | 370, 409 |
| 46 | interleukin 37 | 263327 | 81 | 352179 | 206 | | 254, 293, 332, |
| | | | | | | | 371, 410 |
| 47 | interleukin 37 | 309208 | 82 | 353225 | 207 | | 255, 294, 333, |
| | | | | | | | 372, 411 |
| 48 | leukocyte immunoglobulin-like | 408995 | 83 | 430952 | 208 | | 256, 295, 334, |
| | receptor subfamily B | | | | | | 373, 412 |
| | (with TM and ITIM domains) member 4 | | | | | | |
| 49 | leukocyte immunoglobulin-like | N/A | 84 | N/A | 209 | | |
| | receptor subfamily B | | | | | | |
| | (with TM and ITIM domains) member 4 | | | | | | |
| 50 | Extracellular ILT3 | N/A | 85 | | | | |
| 51 | Extracellular ILT3-IgG1 | N/A | 86 | | | | |
| | Hinge - IgG1-Fc | | | | | | |
| 52 | Extracelllular ILT3-GS | N/A | 87 | | | | |
| | region-IgG4 CH2 CH3 | | | | | | |
| 53 | suppressor of cytokine signaling 1 | 329418 | 88 | 332029 | 210 | | 257, 296, 335, |
| | | | | | | | 374, 413 |
| 54 | suppressor of cytokine signaling 1 | | | N/A | 211 | | |
| 55 | suppressor of cytokine signaling 1 | | | | | | 214 |
| 56 | suppressor of cytokine signaling 1 cDNA | | | | | 217 | |
| 57 | suppressor of cytokine signaling 1 | | | | | | 215 |
| 58 | suppressor of cytokine signaling 1 | | | | | 218 | |
| | with mir-122 in 3′UTR cDNA | | | | | | |
| 59 | TCR inhibitory peptide | N/A | 89 | | | | |
| 60 | TCR inhibitory peptide | N/A | 90 | | | | |
| 61 | TCR inhibitory peptide | N/A | 91 | | | | |
| 62 | TCR inhibitory peptide | N/A | 92 | | | | |
| 63 | TCR inhibitory peptide | N/A | 93 | | | | |
| 64 | TCR inhibitory peptide | N/A | 94 | | | | |
| 65 | TCR inhibitory peptide | N/A | 95 | | | | |
| 66 | TCR inhibitory peptide | N/A | 96 | | | | |
| 67 | TCR inhibitory peptide | N/A | 97 | | | | |
| 68 | TCR inhibitory peptide | N/A | 98 | | | | |
| 69 | TCR inhibitory peptide | N/A | 99 | | | | |
| 70 | TCR inhibitory peptide | N/A | 100 | | | | |
| 71 | TCR inhibitory peptide | N/A | 101 | | | | |
| 72 | TCR inhibitory peptide | N/A | 102 | | | | |
| 73 | TCR inhibitory peptide | N/A | 103 | | | | |
| 74 | TCR inhibitory peptide | N/A | 104 | | | | |
| 75 | TCR inhibitory peptide | N/A | 105 | | | | |
| 76 | TCR inhibitory peptide | N/A | 106 | | | | |
| 77 | TCR inhibitory peptide | N/A | 107 | | | | |
| 78 | TCR inhibitory peptide | N/A | 108 | | | | |
| 79 | TCR inhibitory peptide | N/A | 109 | | | | |
| 80 | TCR inhibitory peptide | N/A | 110 | | | | |
| 81 | TCR inhibitory peptide | N/A | 111 | | | | |
| 82 | TCR inhibitory peptide | N/A | 112 | | | | |
| 83 | TCR inhibitory peptide | N/A | 113 | | | | |
| 84 | TCR inhibitory peptide | N/A | 114 | | | | |
| 85 | TCR inhibitory peptide | N/A | 115 | | | | |
| 86 | TCR inhibitory peptide | N/A | 116 | | | | |
| 87 | TCR inhibitory peptide | N/A | 117 | | | | |
| 88 | TCR inhibitory peptide | N/A | 118 | | | | |
| 89 | TCR inhibitory peptide | N/A | 119 | | | | |
| 90 | TCR inhibitory peptide | N/A | 120 | | | | |
| 91 | TCR inhibitory peptide | N/A | 121 | | | | |
| 92 | TCR inhibitory peptide | N/A | 122 | | | | |
| 93 | TCR inhibitory peptide | N/A | 123 | | | | |
| 94 | TCR inhibitory peptide | N/A | 124 | | | | |
| 95 | TCR inhibitory peptide | N/A | 125 | | | | |
| 96 | TCR inhibitory peptide | N/A | 126 | | | | |
| 97 | TCR inhibitory peptide | N/A | 127 | | | | |
| 98 | TCR inhibitory peptide | N/A | 128 | | | | |
| 99 | TCR inhibitory peptide | N/A | 129 | | | | |
| 100 | TCR inhibitory peptide | N/A | 130 | | | | |
| 101 | TCR inhibitory peptide | N/A | 131 | | | | |
| 102 | TCR inhibitory peptide | N/A | 132 | | | | |
| 103 | TCR inhibitory peptide | N/A | 133 | | | | |
| 104 | TCR inhibitory peptide | N/A | 134 | | | | |
| 105 | TCR inhibitory peptide | N/A | 135 | | | | |
| 106 | TCR inhibitory peptide | N/A | 136 | | | | |
| 107 | TCR inhibitory peptide | N/A | 137 | | | | |
| 108 | TCR inhibitory peptide | N/A | 138 | | | | |
| 109 | TCR inhibitory peptide | N/A | 139 | | | | |
| 110 | TCR inhibitory peptide | N/A | 140 | | | | |
| 111 | TCR inhibitory peptide | N/A | 141 | | | | |
| 112 | TCR inhibitory peptide | N/A | 142 | | | | |
| 113 | TCR inhibitory peptide | N/A | 143 | | | | |
| 114 | TCR inhibitory peptide | N/A | 144 | | | | |
| 115 | TCR inhibitory peptide | N/A | 145 | | | | |
| 116 | TCR inhibitory peptide | N/A | 146 | | | | |
| 117 | TCR inhibitory peptide | N/A | 147 | | | | |
| 118 | TCR inhibitory peptide | N/A | 148 | | | | |
| 119 | TCR inhibitory peptide | N/A | 149 | | | | |
| 120 | TCR inhibitory peptide | N/A | 150 | | | | |
| 121 | TCR inhibitory peptide | N/A | 151 | | | | |
| 122 | TCR inhibitory peptide | N/A | 152 | | | | |
| 123 | TCR inhibitory peptide | N/A | 153 | | | | |
| 124 | TCR inhibitory peptide | N/A | 154 | | | | |
| 125 | transforming growth factor, beta 1 | 221930 | 155 | 221930 | 212 | 219 | 258, 297, 336, |
| | | | | | | | 375, 414, |
| | | | | | | | 512-598 |

[0250] In one embodiment, polynucleotides of the present invention encode PD-L1. Wu et al. (2013, Cellular & Molecular Immunity; 10; 393-402) have suggested that IL-10 and TGF-beta are needed to maintain dendritic cells in tolerogenic state and that PD-L1 is needed for direct cell contact between the cell types and hence it plays important role in Treg expansion. The study showed that tolerogenic dendritic cells promote expansion of Tregs via PD-L1 on their surface and reciprocally Tregs facilitate Tol-DCs to maintain transplantation tolerance of pancreatic islets induced by apoptotic cells via secreting IL-10 and TGF-beta. Consequently, the polynucleotides taught herein provide alternative means of tolerizing cells and cellular systems.

[0251] In some embodiments, the tolerogenic polynucleotides or compositions thereof encoding PD-L1 and/or anti-CD40 ligand antibody may be used before, during or after allogenic bone marrow (BM) transplantation to prevent or ameliorate destruction of tissue allografts. Such treatments may improve or aid in the establishment of hematopoietic chimerism where both recipient and donor bone marrow cells coexist. In one embodiment, the PD-L1 encoding polynucleotides effect tolerization of both CD4 and CD8 T cells. In some embodiments, CD8 T-cells are tolerized and in this embodiment, tolerogenic polynucleotides may encode LAG-3, a homolog of CD4 that binds to MHC class II. Materials and methods for this embodiment can be found at, for example, Lucas et al, Blood, 2011, 117; 5532-5540, the contents of which are incorporated herein by reference in their entirety.

[0252] In some embodiments, tolerogenic polynucleotides may encode anti-CD40 ligand antibodies for the treatment of inflammation or obesity. The polynucleotides of the present invention may be evaluated for such outcomes using the methods as described in Poggi, et al, Arteriosclerosis Thromb. Vasc. Biol, 2011; 31; 2251-2260, the contents of which are incorporated herein by reference in their entirety.

[0253] In some embodiments, anti-CD205 antibodies or CD-205-IgG fusion proteins may be used as antigen carriers in order to tolerize cellular systems. Such antibodies or fusion proteins alone or in combination with an antigen may be delivered with or encoded by any of the tolerogenic polynucleotides of the present invention. Such CD205 fusion proteins and/or CD205 antibodies and/or antigens which may be encoded are taught in for example, Shrimpton, et al, Molecular Immunology, 2009; 46; 1229-1239, the contents of which are incorporated herein by reference in their entirety. Validation may be performed using the methods taught in Shrimpton.

[0254] In some embodiments, the tolerogenic polynucleotides of the present invention may encode soluble CD52. Such a polynucleotide may be used to suppress certain classes of T cells such as such as CD52hiCD4+ cells. In some embodiments, tolerogenic polynucleotides encoding soluble CD52 may be administered to a subject having or suspected of having diabetes. In some embodiments, the tolerogenic polynucleotide encoding soluble CD52 alters the T cell activation as compared to the response to the auto-antigen GAD65. The tolerogenic polynucleotides of the present invention may be evaluated for therapeutic outcomes by the methods described by, for example, Bandala-Sanchez et al, Nature Immunology, 2013, Vol. 14, Pages 741-748; Danke, et al., 2005, J. Autoimmun. Vol. 25, No. 4, Pages 303-311; and Yang et al., 2008, J. Autoimmun. Vol. 31, No. 1, Pages 30-41, the contents of each of which are incorporated herein by reference in their entirety.

[0255] The polynucleotides of the present invention may encode any of the monovalent anti-CD40L antibody polypeptides or fragments thereof disclosed in U.S. Pat. No. 7,563,443, the contents of which are incorporated herein by reference in its entirety. Such polynucleotides may be used for the treatment of immune related disorders or any disease or condition associated with CD40L function.

[0256] Polynucleotides of the present invention may also encode anti-CD40 antibodies, anti CD154 antibodies and/or Fc-silent anti-CD154 domain antibodies such as those described by Pinelli et al (Am. J. Transplantation, 2013, 1-10, DOI: 10.1111/sjt.12417), the contents of which are incorporated herein by reference in their entirety. Such polynucleotides are useful in prolonging graft survival, inhibition of alloreactive T cell expansion, attenuation of cytokine production of antigen-specific T cells and promotion of the conversion of Foxp+ induced Tregs.

[0257] Polynucleotides of the present invention may encode the human anti-CD40 monoclonal antibody, ASKP1240, as disclosed in Oura et al, Am. J. Transplantation, 2012, 12, 1740-54, the contents of which are incorporated herein by reference in its entirety. Such polynucleotides are useful in effecting long term hepatic allograft acceptance. In some embodiments, the polynucleotides of the present invention encode one or more polypeptides or fragments which act to block CD40 (e.g., by blocking binding to CD154) and function as immunosuppressants in the treatment of liver transplantation.

[0258] Polynucleotides of the present invention may be administered in combination with donor specific transfusion (DST). Such co-administration may be used in the treatment of or support of prolongation of islet, cardiac, skin and/or kidney allograft survival. Such methods are described in, for example, Ferrer et al., 2012, PLoS ONE, volume 7, issue 7, e40559, the contents of which are incorporated herein by reference in their entirety.

[0259] Polynucleotides of the present invention may be administered alone or in combination with other polynucleotides or molecules to diminish the number of interferon-gamma producing alloreactive CD8+ T cells and/or to reduce the intra-graft expression of inflammatory chemokines.

[0260] In one embodiment, anti-CD70 antibodies may be encoded by the polynucleotides of the present invention and administered either alone or in combination with anti-CD154. Such polynucleotides may be administered along with polynucleotides encoding anti-LFA1 antibodies such as those of Dai et al., to prolong the survival of heart allografts (Transplant Immunology, 2011, 195-202), the contents of which are incorporated herein by reference in its entirety.

[0261] In some embodiments, the tolerogenic polynucleotides may encode one or more cytokines which permit tolerance to self or non-self antigens. Such cytokines include TGF-beta (including the inactive latent form and the processed form), IL-27, IL-35 and/or IL37, IL-2, IL-10, IL-19, IL-20, IL-22, IL-24, IL-26, including any of the extended IL-10 superfamily as taught by Commins et al, 2008, J. Allergy Clin. Immunol., 121, 1108-1111, the contents of which are incorporated herein by reference in their entirety. These polynucleotides may be co-administered with either a self or non-self antigen.

[0262] In some embodiments, the tolerogenic polynucleotides may encode the Ig-Like Transcript 3 (ILT3) for use in modulating cytokine signaling, allogenic tumor transplantation, GVHD, and/or to induce effective anti-tumor responses in cellular systems. Such polynucleotides or compositions thereof may be evaluated using the methods and/or materials taught in, for example, Suciu-Foca, et al., J. Immunology, 2007, 178, 7432-7441; Vlad and Sucio-Foca, Exp. and Mol. Pathology, 2012, 93, 294-301; Torres-Aguilar, J. Immunol., 2010, 184, 1765-1775; Rutella, et al., Blood, 2006, 108, 1435-1440; Chang, et al., J. Immunol., 2010, 185, 5714-5722; Janikashvili, et al., Clin. and Dev. Immunol., 2011, Article ID 430394; Cheng, et al., J.B.C., 2011, 286, 18013-18025; Chang, et al., J. Immunol., 2012, 188,000; Chang, et al., Nature Immunology, 2002, 3(3), 237; Steinman, et al., Annu. Rev. Immunol., 2003, 21, 685-711; Vlad, et al., Diabetes, 2008, 57, 1878; Ge, et al., Transplant Immunology, 2012, 26, 19-26, the contents of each of which are incorporated herein by reference in their entirety.

[0263] In some embodiments, the tolerogenic polynucleotides may encode the SOCS1 for use in inhibiting cytokine signaling and/or to induce effective anti-tumor responses in cellular systems. Such polynucleotides or compositions thereof may be evaluated using the methods and/or materials taught in, for example, Evel-Kabler et al., J. Clin. Invest. 2006, 116(1); Yoshimura et al., Arthritis Research & Therapy, 2005, 7(3), 100; the contents of each of which are incorporated herein by reference in their entirety.

[0264] In some embodiments, the tolerogenic polynucleotides may encode the IL-35 for use in treating arthritis, limiting chronic inflammatory disease such as asthma and inflammatory bowel disease or colitis or in particular microenvironments such as intestinal infection with Trichuris muris or tumor microenvironments. Such polynucleotides or compositions thereof may be evaluated using the methods and/or materials taught in, for example, Collison et al., Nature, 2007, 450(22), 566-571; Wirtz, et al., Gastroenterology, 2011, 141(5), 1875-1886; Kochetkova et al., J. Immunol. 2010, 184, 7144-7153; Neidbala, et al., Eur. J. Immunol., 2007, 37, 3021-3029; Collison, Nature Immunity, 2010, 11(12), 1093, the contents of each of which are incorporated herein by reference in their entirety.

[0265] In some embodiments, the tolerogenic polynucleotides may encode the IL-37 (formerly known as IL-1H4 and IL-1F7) for use in suppressing inflammatory and/or immune responses. Such polynucleotides or compositions thereof are taught in, and may be evaluated using the methods and/or materials of, for example, Bufler et al, PNAS, 2002, 99(21), 13723-13728; Nold et al., Nature Immunol. 2010, 11(11), 1014; Kumar et al., Cytokine, 2002, 18(2), 61-71; Boraschi, et al., Eur. Cytokine Netw., 2011, 22(3), 127-47; and Sharma et al., J. Immunol., 2008, 180, 5477-5482, the contents of each of which is incorporated herein by reference in their entirety.

[0266] Tolerogenic polynucleotides encoding IL-2 or compositions thereof may be administered to subjects for the amelioration and/or treatment of autoimmune anemia, diabetes, general autoimmunity, humoral immune responses, systemic autoimmunity, dermatomyositis, influenza, or inflammatory bowel disease.

[0267] Tolerogenic polynucleotides encoding IL-10 or compositions thereof may be administered to subjects for the amelioration and/or treatment of infections, intestinal homeostasis including colitis, inflammatory bowel disease, autoimmune diseases including lupus, cancers such as melanoma and infectious diseases including leishmaniasis and tuberculosis, Chron's disease, and psoriasis.

[0268] Tolerogenic polynucleotides encoding IL-27, IL-35 and/or IL37 or compositions thereof may be administered to subjects for the amelioration and/or treatment of pathogen-associated conditions or diseases.

[0269] In some embodiments, the tolerogenic polynucleotides may encode the hematopoietic growth factor, Flt3L for use in promoting immune tolerance. Such polynucleotides or compositions thereof may be evaluated using the encoded Flt3 ligand, methods and/or materials taught in, for example, Klein et al, Eur. J. Immunology, 2013, 43, 533-539, the contents of which are incorporated herein by reference in their entirety.

[0270] In some embodiments, the tolerogenic polynucleotides may encode the growth factor, TGFbeta 1. Such polynucleotides or compositions thereof may be evaluated using encoded TGFbeta1, in methods and/or materials taught in, for example, Li, et al., BMB Reports, 201245(9), 509-514, the contents of which are incorporated herein by reference in their entirety.

[0271] In some embodiments, the tolerogenic polynucleotides may encode the galectin-1 for use in suppressing autoimmune neuroinflammation. Such polynucleotides may be evaluated using the encoded galectin-1, an endogenous glycan-binding protein, the methods and/or materials taught in, for example, Ilarregui, et al, Nature Immunology, 2009, vol 10, no. 9, 981, the contents of which are incorporated herein by reference in their entirety.

[0272] In some embodiments, the tolerogenic polynucleotides may encode a soluble GARP (glycoprotein A repetitions predominant) protein for use as an immunomodulator of inflammatory diseases including transplant rejection, autoimmunity and allergy. Such polynucleotides may be evaluated by encoding the soluble GARP (sGARP) or using the methods and/or materials taught in, for example, Hahn, et al, Blood, 2013, 122(7); 1182-1191 or the methods and/or materials taught in, for example, Wang, et al., PNAS, 2009, 106(32), 13439-13444, the contents of both of which are incorporated herein by reference in their entirety.

[0273] In some embodiments, the tolerogenic polynucleotides of the present invention may encode one or more tregitopes, tregitope conjugates or tregitope cores, fragments or cores having flanks Included in the tregitope family are any of those disclosed in, for example, U.S. Pat. No. 7,884,184, van der Marel, et al., World J. Gasteroent. 2012, 18(32) 4288-4299; Hui, et al., Mol. Therapy, 2013, 21(9), 1727-1737; Elyaman et al., Neurol. Res. International, 2011 Article ID256460; De Groot, et al., Blood 2008, 112, 3303-3311; Cousens et al., J. Diab. Research, 2013, Article ID 621693; Cousens, et al., Autoimmunity Reviews, 2012, doi: 10.1016, the contents of which are incorporated herein by reference in its entirety.

[0274] Evalulation of such encoded tregitopes may be performed using the materials and/or methods taught in, U.S. Pat. No. 7,884,184, van der Marel, et al., World J. Gasteroent. 2012, 18(32) 4288-4299; Hui, et al., Mol. Therapy, 2013, 21(9), 1727-1737; Elyaman et al., Neurol. Res. International, 2011 Article ID256460; De Groot, et al., Blood 2008, 112, 3303-3311; Cousens et al., J. Diab. Research, 2013, Article ID 621693; Cousens, et al., Autoimmunity Reviews, 2012, doi: 10.1016, the contents of which are incorporated herein by reference in its entirety.

[0275] In some embodiments, the tolerogenic polynucleotides may encode one or more proteins from a parasite such as a helminth, including but not limited to the Sj16 protein from Schistosoma Japonicum or a total extract from Fasciola hepatica, or high molecular weight components of Ascaris suum, or soluble worm extract (SWA) or eggs (SEA) of Schistosoma mansoni. Such tolerogenic polynucleotides or compositions thereof are useful in the treatment of wounds to improve wound healing, diabetes, inflammation or protection against parasitic infections. Encoded proteins or peptides or extracts include those taught in, for example Hu et al, International J. Parasitol. 2009; 38, 191-200; Hu et al, J. Parasitol. 2012; 98(2), 274-283; Carranza et al, 2012, PLoS ONE, vol. 7, Issue 7, 1-9; Sun et al, 2012, Parasite Immunology, 34, 430-439; Zaccone et al., 2010, J. Biomed. And Biotech., ArticlelD 795210, doi:10.1155/2010/79521; Silva et al., 2006, Eur. J. Immunol., 36, 3227-3237; Gravano and Vignali, 2012, Cell Mol. Life Sci, 69(12), 1997-2008; and Gause et al, 2013, Nature Reviews: Immunology, 13, 607-614, the contents of each of which is incorporated herein by reference in their entireties. Evalulation of such encoded proteins or peptides may be performed using the materials and/or methods taught in, for example, Hu et al, International J. Parasitol. 2009; 38, 191-200; Hu et al, J. Parasitol. 2012; 98(2), 274-283; Carranza et al, 2012, PLoS ONE, vol. 7, Issue 7, 1-9; Sun et al, 2012, Parasite Immunology, 34, 430-439; Zaccone et al., 2010, J. Biomed. And Biotech., ArticlelD 795210, doi:10.1155/2010/79521; Silva et al., 2006, Eur. J. Immunol., 36, 3227-3237, the contents of each of which is incorporated herein by reference in their entirety.

[0276] In some embodiments, the tolerogenic polynucleotides may encode one or more peptides for use in the inhibition of Tcell receptor (TCR) signaling. Such tolerogenic polynucleotides or compositions thereof are useful in the treatment of a disease or condition where T-cells are involved and are taught in for example US Publication 2013/0039948 published Feb. 14, 2013, the contents of which are incorporated herein by reference in its entirety.

[0277] Evalulation of such encoded proteins or peptides may be performed using the materials and/or methods taught in, for example, example US Publication 2013/0039948 published Feb. 14, 2013, the contents of which are incorporated herein by reference in its entirety.

[0278] In some embodiments, the tolerogenic polynucleotides may encode the tryptophan catabolizing enzyme indoleamine 2,3,-dioxygense (IDO). Such tolerogenic polynucleotides or compositions thereof are useful in the treatment of systemic autoimmune disease. Evalulation of such encoded proteins or peptides may be performed using the materials and/or methods taught in, for example, Ravishankar et al, 2012, PNAS, Early Edition, doi/10.1073pnas1117736109, 1-6; Munn and Mellor, 2013, Cell, 34(3), 137-143; Curti, et al, 2009, Blood, 113, 2394-2401, the contents of each of which are incorporated herein by reference in their entirety.

[0279] In some embodiments, the tolerogenic polynucleotides may encode the foxp3 transcription factor. Such tolerogenic polynucleotides or compositions thereof may also comprise a cell penetrating peptide such as the N-terminal fragment of long PTEN isoform. These may be delivered to target APCs using any formulation taught herein, such as lipid nanoparticles. These may also incorporate or comprise one or more microRNA, microRNA binding site or precursor to minimize non-APC, non-DC and non lymphocytic translation. Evalulation of such encoded proteins or peptides may be performed using the materials and/or methods taught in, for example Hopkins et al, 2013, Science, Vol. 341, No. 6144, Pages 399-402.

### Protein Cleavage Signals and Sites

[0280] In one embodiment, the polypeptides of the present invention may include at least one protein cleavage signal containing at least one protein cleavage site. The protein cleavage site may be located at the N-terminus, the C-terminus, at any space between the N- and the C-termini such as, but not limited to, half-way between the N- and C-termini, between the N-terminus and the half way point, between the half way point and the C-terminus, and combinations thereof.

[0281] In one embodiment, the polynucleotides of the present invention may be engineered such that the polynucleotide contains at least one encoded protein cleavage signal. The encoded protein cleavage signal may be located in any region including but not limited to before the start codon, after the start codon, before the coding region, within the coding region such as, but not limited to, half way in the coding region, between the start codon and the half way point, between the half way point and the stop codon, after the coding region, before the stop codon, between two stop codons, after the stop codon and combinations thereof.

[0282] The encoded protein cleavage signal may include, but is not limited to, a proprotein convertase (or prohormone convertase), thrombin and/or Factor Xa protein cleavage signal.

[0283] As a non-limiting example, U.S. Pat. No. 7,374,930 and U.S. Pub. No. 20090227660, herein incorporated by reference in their entireties, use a furin cleavage site to cleave the N-terminal methionine of GLP-1 in the expression product from the Golgi apparatus of the cells. In one embodiment, the polypeptides of the present invention include at least one protein cleavage signal and/or site with the proviso that the polypeptide is not GLP-1.

### Insertions and Substitutions

[0284] In one embodiment, the 5′UTR of the polynucleotide may be replaced by the insertion of at least one region and/or string of nucleosides of the same base. The region and/or string of nucleotides may include, but is not limited to, at least 3, at least 4, at least 5, at least 6, at least 7 or at least 8 nucleotides and the nucleotides may be natural and/or unnatural. As a non-limiting example, the group of nucleotides may include 5-8 adenine, cytosine, thymine, a string of any of the other nucleotides disclosed herein and/or combinations thereof.

[0285] In one embodiment, the 5′UTR of the polynucleotide may be replaced by the insertion of at least two regions and/or strings of nucleotides of two different bases such as, but not limited to, adenine, cytosine, thymine, any of the other nucleotides disclosed herein and/or combinations thereof. For example, the 5′UTR may be replaced by inserting 5-8 adenine bases followed by the insertion of 5-8 cytosine bases. In another example, the 5′UTR may be replaced by inserting 5-8 cytosine bases followed by the insertion of 5-8 adenine bases.

[0286] In one embodiment, the polynucleotide may include at least one substitution and/or insertion downstream of the transcription start site which may be recognized by an RNA polymerase. As a non-limiting example, at least one substitution and/or insertion may occur downstream the transcription start site by substituting at least one nucleic acid in the region just downstream of the transcription start site (such as, but not limited to, +1 to +6). Changes to region of nucleotides just downstream of the transcription start site may affect initiation rates, increase apparent nucleotide triphosphate (NTP) reaction constant values, and increase the dissociation of short transcripts from the transcription complex curing initial transcription (Brieba et al, Biochemistry (2002) 41: 5144-5149; herein incorporated by reference in its entirety). The modification, substitution and/or insertion of at least one nucleoside may cause a silent mutation of the sequence or may cause a mutation in the amino acid sequence.

[0287] In one embodiment, the polynucleotide may include the substitution of at least 1, at least 2, at least 3, at least 4, at least 5, at least 6, at least 7, at least 8, at least 9, at least 10, at least 11, at least 12 or at least 13 guanine bases downstream of the transcription start site.

[0288] In one embodiment, the polynucleotide may include the substitution of at least 1, at least 2, at least 3, at least 4, at least 5 or at least 6 guanine bases in the region just downstream of the transcription start site. As a non-limiting example, if the nucleotides in the region are GGGAGA the guanine bases may be substituted by at least 1, at least 2, at least 3 or at least 4 adenine nucleotides. In another non-limiting example, if the nucleotides in the region are GGGAGA the guanine bases may be substituted by at least 1, at least 2, at least 3 or at least 4 cytosine bases. In another non-limiting example, if the nucleotides in the region are GGGAGA the guanine bases may be substituted by at least 1, at least 2, at least 3 or at least 4 thymine, and/or any of the nucleotides described herein.

[0289] In one embodiment, the polynucleotide may include at least one substitution and/or insertion upstream of the start codon. For the purpose of clarity, one of skill in the art would appreciate that the start codon is the first codon of the protein coding region whereas the transcription start site is the site where transcription begins. The polynucleotide may include, but is not limited to, at least 1, at least 2, at least 3, at least 4, at least 5, at least 6, at least 7 or at least 8 substitutions and/or insertions of nucleotide bases. The nucleotide bases may be inserted or substituted at 1, at least 1, at least 2, at least 3, at least 4 or at least 5 locations upstream of the start codon. The nucleotides inserted and/or substituted may be the same base (e.g., all A or all C or all T or all G), two different bases (e.g., A and C, A and T, or C and T), three different bases (e.g., A, C and T or A, C and T) or at least four different bases. As a non-limiting example, the guanine base upstream of the coding region in the polynucleotide may be substituted with adenine, cytosine, thymine, or any of the nucleotides described herein. In another non-limiting example the substitution of guanine bases in the polynucleotide may be designed so as to leave one guanine base in the region downstream of the transcription start site and before the start codon (see Esvelt et al. Nature (2011) 472(7344):499-503; the contents of which is herein incorporated by reference in its entirety). As a non-limiting example, at least 5 nucleotides may be inserted at 1 location downstream of the transcription start site but upstream of the start codon and the at least 5 nucleotides may be the same base type.

### Incorporating Post Transcriptional Control Modulators

[0290] In one embodiment, the polynucleotides of the present invention may include at least one post transcriptional control modulator. These post transcriptional control modulators may be, but are not limited to, small molecules, compounds and regulatory sequences. As a non-limiting example, post transcriptional control may be achieved using small molecules identified by PTC Therapeutics Inc. (South Plainfield, N.J.) using their GEMS™ (Gene Expression Modulation by Small-Molecules) screening technology.

[0291] The post transcriptional control modulator may be a gene expression modulator which is screened by the method detailed in or a gene expression modulator described in International Publication No. WO2006022712, herein incorporated by reference in its entirety. Methods identifying RNA regulatory sequences involved in translational control are described in International Publication No. WO2004067728, herein incorporated by reference in its entirety; methods identifying compounds that modulate untranslated region dependent expression of a gene are described in International Publication No. WO2004065561, herein incorporated by reference in its entirety.

[0292] In one embodiment, the polynucleotides of the present invention may include at least one post transcriptional control modulator is located in the 5′ and/or the 3′ untranslated region of the polynucleotides of the present invention.

[0293] In another embodiment, the polynucleotides of the present invention may include at least one post transcription control modulator to modulate premature translation termination. The post transcription control modulators may be compounds described in or a compound found by methods outlined in International Publication Nos. WO2004010106, WO2006044456, WO2006044682, WO2006044503 and WO2006044505, each of which is herein incorporated by reference in its entirety. As a non-limiting example, the compound may bind to a region of the 28S ribosomal RNA in order to modulate premature translation termination (See e.g., WO2004010106, herein incorporated by reference in its entirety).

[0294] In one embodiment, polynucleotides of the present invention may include at least one post transcription control modulator to alter protein expression. As a non-limiting example, the expression of VEGF may be regulated using the compounds described in or a compound found by the methods described in International Publication Nos. WO2005118857, WO2006065480, WO2006065479 and WO2006058088, each of which is herein incorporated by reference in its entirety.

[0295] The polynucleotides of the present invention may include at least one post transcription control modulator to control translation. In one embodiment, the post transcription control modulator may be a RNA regulatory sequence. As a non-limiting example, the RNA regulatory sequence may be identified by the methods described in International Publication No. WO2006071903, herein incorporated by reference in its entirety.

### II. Design, Synthesis and Quantitation of Polynucleotides

### Codon Optimization

[0296] The polynucleotides, their regions or parts or subregions may be codon optimized. Codon optimization methods are known in the art and may be useful in efforts to achieve one or more of several goals. These goals include to match codon frequencies in target and host organisms to ensure proper folding, bias GC content to increase mRNA stability or reduce secondary structures, minimize tandem repeat codons or base runs that may impair gene construction or expression, customize transcriptional and translational control regions, insert or remove protein trafficking sequences, remove/add post translation modification sites in encoded protein (e.g. glycosylation sites), add, remove or shuffle protein domains, insert or delete restriction sites, modify ribosome binding sites and mRNA degradation sites, to adjust translational rates to allow the various domains of the protein to fold properly, or to reduce or eliminate problem secondary structures within the polynucleotide. Codon optimization tools, algorithms and services are known in the art, non-limiting examples include services from GeneArt (Life Technologies), DNA2.0 (Menlo Park Calif.) and/or proprietary methods. In one embodiment, the ORF sequence is optimized using optimization algorithms. Codon options for each amino acid are given in Table 4.

TABLE 4
Codon Options

| | Single | |
|---|---|---|
| Amino Acid | Letter Code | Codon Options |
| Isoleucine | I | ATT, ATC, ATA |
| Leucine | L | CTT, CTC, CTA, CTG, TTA, TTG |
| Valine | V | GTT, GTC, GTA, GTG |
| Phenylalanine | F | TTT, TTC |
| Methionine | M | ATG |
| Cysteine | C | TGT, TGC |
| Alanine | A | GCT, GCC, GCA, GCG |
| Glycine | G | GGT, GGC, GGA, GGG |
| Proline | P | CCT, CCC, CCA, CCG |
| Threonine | T | ACT, ACC, ACA, ACG |
| Serine | S | TCT, TCC, TCA, TCG, AGT, AGC |
| Tyrosine | Y | TAT, TAC |
| Tryptophan | W | TGG |
| Glutamine | Q | CAA, CAG |
| Asparagine | N | AAT, AAC |
| Histidine | H | CAT, CAC |
| Glutamic acid | E | GAA, GAG |
| Aspartic acid | D | GAT, GAC |
| Lysine | K | AAA, AAG |
| Arginine | R | CGT, CGC, CGA, CGG, AGA, AGG |
| Selenocysteine | Sec | UGA in mRNA in presence of |
| | | Selenocysteine insertion element (SECIS) |
| Stop codons | Stop | TAA, TAG, TGA |

[0297] Features, which may be considered beneficial in some embodiments of the present invention, may be encoded by regions of the polynucleotide and such regions may be upstream (5′) or downstream (3′) to a region which encodes a polypeptide. These regions may be incorporated into the polynucleotide before and/or after codon optimization of the protein encoding region or open reading frame (ORF). It is not required that a polynucleotide contain both a 5′ and 3′ flanking region. Examples of such features include, but are not limited to, untranslated regions (UTRs), Kozak sequences, an oligo(dT) sequence, and detectable tags and may include multiple cloning sites which may have XbaI recognition.

[0298] In some embodiments, a 5′ UTR and/or a 3′ UTR region may be provided as flanking regions. Multiple 5′ or 3′ UTRs may be included in the flanking regions and may be the same or of different sequences. Any portion of the flanking regions, including none, may be codon optimized and any may independently contain one or more different structural or chemical modifications, before and/or after codon optimization.

[0299] After optimization (if desired), the polynucleotides components are reconstituted and transformed into a vector such as, but not limited to, plasmids, viruses, cosmids, and artificial chromosomes. For example, the optimized polynucleotide may be reconstituted and transformed into chemically competent E. coli, yeast, neurospora, maize, drosophila, etc. where high copy plasmid-like or chromosome structures occur by methods described herein.

[0300] Synthetic polynucleotides and their nucleic acid analogs play an important role in the research and studies of biochemical processes. Various enzyme-assisted and chemical-based methods have been developed to synthesize polynucleotides and nucleic acids.

### Enzymatic Methods

[0301] The polynucleotides of the present invention may be synthesized using enzymatic methods known in the art. As a non-limiting example, enzymatic methods, in vitro transcription-enzymatic synthesis and RNA polymerases useful for synthesis are described in co-pending International Publication No. WO2015034928, the contents of which are herein incorporated by reference, such as in paragraphs [000276]-[000297].

### Solid-Phase Chemical Synthesis

[0302] The polynucleotides of the present invention (e.g., chimeric polynucleotides or circular polynucleotides) may be manufactured in whole or in part using solid phase techniques. As a non-limiting example, solid phase techniques useful for synthesis are described in co-pending International Publication No. WO2015034928, the contents of which are herein incorporated by reference, such as in paragraphs [000298]-[000307]. Liquid

### Phase Chemical Synthesis

[0303] The synthesis of chimeric polynucleotides or circular polynucleotides of the present invention by the sequential addition of monomer building blocks may be carried out in a liquid phase. A covalent bond is formed between the monomers or between a terminal functional group of the growing chain and an incoming monomer. Functional groups not involved in the reaction must be temporarily protected. After the addition of each monomer building block, the reaction mixture has to be purified before adding the next monomer building block. The functional group at one terminal of the chain has to be deprotected to be able to react with the next monomer building blocks. A liquid phase synthesis is labor- and time-consuming and cannot not be automated. Despite the limitations, liquid phase synthesis is still useful in preparing short polynucleotides in a large scale. Because the system is homogenous, it does not require a large excess of reagents and is cost-effective in this respect.

### Combination of Different Synthetic Methods

[0304] The synthetic methods discussed above each has its own advantages and limitations. Attempts have been conducted to combine these methods to overcome the limitations. Such combinations of methods are within the scope of the present invention. As a non-limiting example, combinations of the different synthetic methods useful for the present invention are described in co-pending International Publication No. WO2015034928, the contents of which are herein incorporated by reference, such as in paragraphs [000309]-[000312].

### Small Region Synthesis

[0305] Regions or subregions of the polynucleotides of the present invention may comprise small RNA molecules such as siRNA, and therefore may be synthesized in the same manner. There are several methods for preparing siRNA, such as chemical synthesis using appropriately protected ribonucleoside phosphoramidites, in vitro transcription, siRNA expression vectors, and PCR expression cassettes. Sigma-Aldrich® is one of the siRNA suppliers and synthesizes their siRNA using ribonucleoside phosphoramidite monomers protected at the 2′ position with a t-butylmethylsilyl (TBDMS) group. The solid-phase chemical synthesis is carried out with SIGMA-ALDRICH®'s Ultra Fast Parallel Synthesis (UFPS) and Ultra Fast Parallel Deprotection (UFPD) to achieve high coupling efficiency and fast deprotection. The final siRNA products may be purified with HPLC or PAGE. Such methods may be used to synthesize regions or subregions of chimeric polynucleotides.

[0306] In vitro transcription and expression from a vector or a PCR-generated siRNA cassette require appropriate templates to produce siRNAs. The commercially available AMBION® SILENCER® siRNA construction kit produces siRNA by in vitro transcription of DNA templates and contains the enzymes, buffers, primers needed. Such methods may be used to synthesize regions or subregions of chimeric polynucleotides.

### Ligation of Polynucleotide Regions or Subregions

[0307] Polynucleotides such as chimeric polynucleotides and/or circular polynucleotides may be prepared by ligation of one or more regions or subregions. As a non-limiting example, methods for the ligation of polynucleotide regions or subregions useful in the present invention are described in co-pending International Publication No. WO2015034928, the contents of which are herein incorporated by reference, such as in paragraphs [000315]-[000322].

[0308] Modification and Conjugation of Polynucleotides

[0309] Non-natural modified nucleotides may be introduced to polynucleotides or nucleic acids during synthesis or post-synthesis of the chains to achieve desired functions or properties. The modifications may be on internucleotide lineage, the purine or pyrimidine bases, or sugar. The modification may be introduced at the terminal of a chain or anywhere else in the chain; with chemical synthesis or with a polymerase enzyme. For example, hexitol nucleic acids (HNAs) are nuclease resistant and provide strong hybridization to RNA. Short messenger RNAs (mRNAs) with hexitol residues in two codons have been constructed (Lavrik et al., Biochemistry, 40, 11777-11784 (2001), the contents of which are incorporated herein by reference in their entirety). The antisense effects of a chimeric HNA gapmer oligonucleotide comprising a phosphorothioate central sequence flanked by 5′ and 3′ HNA sequences have also been studied (See e.g., Kang et al., Nucleic Acids Research, vol. 32(4), 4411-4419 (2004), the contents of which are incorporated herein by reference in their entirety). The preparation and uses of modified nucleotides comprising 6-member rings in RNA interference, antisense therapy or other applications are disclosed in US Pat. Application No. 2008/0261905, US Pat. Application No. 2010/0009865, and PCT Application No. WO97/30064 to Herdewijn et al.; the contents of each of which are herein incorporated by reference in their entireties). Modified nucleic acids and their synthesis are disclosed in copending International Patent Publication No. WO2013052523 (Attorney Docket Number M09), the contents of which are incorporated herein by reference in their entirety. The synthesis and strategy of modified polynucleotides is reviewed by Verma and Eckstein in Annual Review of Biochemistry, vol. 76, 99-134 (1998), the contents of which are incorporated herein by reference in their entirety.

[0310] Either enzymatic or chemical ligation methods can be used to conjugate polynucleotides or their regions with different functional blocks, such as fluorescent labels, liquids, nanoparticles, delivery agents, etc. The conjugates of polynucleotides and modified polynucleotides are reviewed by Goodchild in Bioconjugate Chemistry, vol. 1(3), 165-187 (1990), the contents of which are incorporated herein by reference in their entirety. U.S. Pat. No. 6,835,827 and U.S. Pat. No. 6,525,183 to Vinayak et al. (the contents of each of which are herein incorporated by reference in their entireties) teach synthesis of labeled oligonucleotides using a labeled solid support.

### Quantification

[0311] In one embodiment, the polynucleotides of the present invention may be quantified in exosomes or when derived from one or more bodily fluid. As used herein “bodily fluids” include peripheral blood, serum, plasma, ascites, urine, cerebrospinal fluid (CSF), sputum, saliva, bone marrow, synovial fluid, aqueous humor, amniotic fluid, cerumen, breast milk, broncheoalveolar lavage fluid, semen, prostatic fluid, cowper's fluid or pre-ejaculatory fluid, sweat, fecal matter, hair, tears, cyst fluid, pleural and peritoneal fluid, pericardial fluid, lymph, chyme, chyle, bile, interstitial fluid, menses, pus, sebum, vomit, vaginal secretions, mucosal secretion, stool water, pancreatic juice, lavage fluids from sinus cavities, bronchopulmonary aspirates, blastocyl cavity fluid, and umbilical cord blood. Alternatively, exosomes may be retrieved from an organ selected from the group consisting of lung, heart, pancreas, stomach, intestine, bladder, kidney, ovary, testis, skin, colon, breast, prostate, brain, esophagus, liver, and placenta.

[0312] In the exosome quantification method, a sample of not more than 2 mL is obtained from the subject and the exosomes isolated by size exclusion chromatography, density gradient centrifugation, differential centrifugation, nanomembrane ultrafiltration, immunoabsorbent capture, affinity purification, microfluidic separation, or combinations thereof. In the analysis, the level or concentration of a polynucleotide may be an expression level, presence, absence, truncation or alteration of the administered construct. It is advantageous to correlate the level with one or more clinical phenotypes or with an assay for a human disease biomarker. The assay may be performed using construct specific probes, cytometry, qRT-PCR, real-time PCR, PCR, flow cytometry, electrophoresis, mass spectrometry, or combinations thereof while the exosomes may be isolated using immunohistochemical methods such as enzyme linked immunosorbent assay (ELISA) methods. Exosomes may also be isolated by size exclusion chromatography, density gradient centrifugation, differential centrifugation, nanomembrane ultrafiltration, immunoabsorbent capture, affinity purification, microfluidic separation, or combinations thereof.

[0313] These methods afford the investigator the ability to monitor, in real time, the level of polynucleotides remaining or delivered. This is possible because the polynucleotides of the present invention differ from the endogenous forms due to the structural or chemical modifications.

[0314] In one embodiment, the polynucleotide may be quantified using methods such as, but not limited to, ultraviolet visible spectroscopy (UV/Vis). A non-limiting example of a UV/Vis spectrometer is a NANODROP® spectrometer (ThermoFisher, Waltham, Mass.). The quantified polynucleotide may be analyzed in order to determine if the polynucleotide may be of proper size, check that no degradation of the polynucleotide has occurred. Degradation of the polynucleotide may be checked by methods such as, but not limited to, agarose gel electrophoresis, HPLC based purification methods such as, but not limited to, strong anion exchange HPLC, weak anion exchange HPLC, reverse phase HPLC (RP-HPLC), and hydrophobic interaction HPLC (HIC-HPLC), liquid chromatography-mass spectrometry (LCMS), capillary electrophoresis (CE) and capillary gel electrophoresis (CGE).

### Purification

[0315] Purification of the polynucleotides described herein may include, but is not limited to, polynucleotide clean-up, quality assurance and quality control. Clean-up may be performed by methods known in the arts such as, but not limited to, AGENCOURT® beads (Beckman Coulter Genomics, Danvers, Mass.), poly-T beads, LNA™ oligo-T capture probes (EXIQON® Inc, Vedbaek, Denmark) or HPLC based purification methods such as, but not limited to, strong anion exchange HPLC, weak anion exchange HPLC, reverse phase HPLC (RP-HPLC), and hydrophobic interaction HPLC (HIC-HPLC). The term “purified” when used in relation to a polynucleotide such as a “purified polynucleotide” refers to one that is separated from at least one contaminant. As used herein, a “contaminant” is any substance which makes another unfit, impure or inferior. Thus, a purified polynucleotide (e.g., DNA and RNA) is present in a form or setting different from that in which it is found in nature, or a form or setting different from that which existed prior to subjecting it to a treatment or purification method.

[0316] A quality assurance and/or quality control check may be conducted using methods such as, but not limited to, gel electrophoresis, UV absorbance, or analytical HPLC.

[0317] In another embodiment, the polynucleotides may be sequenced by methods including, but not limited to reverse-transcriptase-PCR.

### III. Modifications

[0318] As used herein in a polynucleotide (such as a chimeric polynucleotide, IVT polynucleotide or a circular polynucleotide), the terms “chemical modification” or, as appropriate, “chemically modified” refer to modification with respect to adenosine (A), guanosine (G), uridine (U), thymidine (T) or cytidine (C) ribo- or deoxyribonucleotides in one or more of their position, pattern, percent or population. Generally, herein, these terms are not intended to refer to the ribonucleotide modifications in naturally occurring 5′-terminal mRNA cap moieties.

[0319] In a polypeptide, the term “modification” refers to a modification as compared to the canonical set of 20 amino acids.

[0320] The modifications may be various distinct modifications. In some embodiments, the regions may contain one, two, or more (optionally different) nucleoside or nucleotide modifications. In some embodiments, a modified polynucleotide, introduced to a cell may exhibit reduced degradation in the cell, as compared to an unmodified polynucleotide.

[0321] Modifications which are useful in the present invention include, but are not limited to those in Table 5. Noted in the table are the symbol of the modification, the nucleobase type and whether the modification is naturally occurring or not.

TABLE 5
Modifications

| Name | Symbol | Base | Naturally Occurring |
|---|---|---|---|
| 2-methylthio-N6-(cis- | ms2i6A | A | YES |
| hydroxyisopentenyl)adenosine | | | |
| 2-methylthio-N6-methyladenosine | ms2m6A | A | YES |
| 2-methylthio-N6-threonyl carbamoyladenosine | ms2t6A | A | YES |
| N6-glycinylcarbamoyladenosine | g6A | A | YES |
| N6-isopentenyladenosine | i6A | A | YES |
| N6-methyladenosine | m6A | A | YES |
| N6-threonylcarbamoyladenosine | t6A | A | YES |
| 1,2′-O-dimethyladenosine | m1Am | A | YES |
| 1-methyladenosine | m1A | A | YES |
| 2′-O-methyladenosine | Am | A | YES |
| 2′-O-ribosyladenosine (phosphate) | Ar(p) | A | YES |
| 2-methyladenosine | m2A | A | YES |
| 2-methylthio-N6 isopentenyladenosine | ms2i6A | A | YES |
| 2-methylthio-N6-hydroxynorvalyl | ms2hn6A | A | YES |
| carbamoyladenosine | | | |
| 2′-O-methyladenosine | m6A | A | YES |
| 2′-O-ribosyladenosine (phosphate) | Ar(p) | A | YES |
| isopentenyladenosine | Iga | A | YES |
| N6-(cis-hydroxyisopentenyl)adenosine | io6A | A | YES |
| N6,2′-O-dimethyladenosine | m6Am | A | YES |
| N⁶,2′-O-dimethyladenosine | m⁶Am | A | YES |
| N6,N6,2′-O-trimethyladenosine | m62Am | A | YES |
| N6,N6-dimethyladenosine | m62A | A | YES |
| N6-acetyladenosine | ac6A | A | YES |
| N6-hydroxynorvalylcarbamoyladenosine | hn6A | A | YES |
| N6-methyl-N6-threonylcarbamoyladenosine | m6t6A | A | YES |
| 2-methyladenosine | m²A | A | YES |
| 2-methylthio-N⁶-isopentenyladenosine | ms²i⁶A | A | YES |
| 7-deaza-adenosine | — | A | NO |
| N1-methyl-adenosine | — | A | NO |
| N6,N6 (dimethyl)adenine | — | A | NO |
| N6-cis-hydroxy-isopentenyl-adenosine | — | A | NO |
| α-thio-adenosine | — | A | NO |
| 2 (amino)adenine | — | A | NO |
| 2 (aminopropyl)adenine | — | A | NO |
| 2 (methylthio) N6 (isopentenyl)adenine | — | A | NO |
| 2-(alkyl)adenine | — | A | NO |
| 2-(aminoalkyl)adenine | — | A | NO |
| 2-(aminopropyl)adenine | — | A | NO |
| 2-(halo)adenine | — | A | NO |
| 2-(halo)adenine | — | A | NO |
| 2-(propyl)adenine | — | A | NO |
| 2′-Amino-2′-deoxy-ATP | — | A | NO |
| 2′-Azido-2′-deoxy-ATP | — | A | NO |
| 2′-Deoxy-2′-a-aminoadenosine TP | — | A | NO |
| 2′-Deoxy-2′-a-azidoadenosine TP | — | A | NO |
| 6 (alkyl)adenine | — | A | NO |
| 6 (methyl)adenine | — | A | NO |
| 6-(alkyl)adenine | — | A | NO |
| 6-(methyl)adenine | — | A | NO |
| 7 (deaza)adenine | — | A | NO |
| 8 (alkenyl)adenine | — | A | NO |
| 8 (alkynyl)adenine | — | A | NO |
| 8 (amino)adenine | — | A | NO |
| 8 (thioalkyl)adenine | — | A | NO |
| 8-(alkenyl)adenine | — | A | NO |
| 8-(alkyl)adenine | — | A | NO |
| 8-(alkynyl)adenine | — | A | NO |
| 8-(amino)adenine | — | A | NO |
| 8-(halo)adenine | — | A | NO |
| 8-(hydroxyl)adenine | — | A | NO |
| 8-(thioalkyl)adenine | — | A | NO |
| 8-(thiol)adenine | — | A | NO |
| 8-azido-adenosine | — | A | NO |
| aza adenine | — | A | NO |
| deaza adenine | — | A | NO |
| N6 (methyl)adenine | — | A | NO |
| N6-(isopentyl)adenine | — | A | NO |
| 7-deaza-8-aza-adenosine | — | A | NO |
| 7-methyladenine | — | A | NO |
| 1-Deazaadenosine TP | — | A | NO |
| 2′Fluoro-N6-Bz-deoxyadenosine TP | — | A | NO |
| 2′-OMe-2-Amino-ATP | — | A | NO |
| 2′O-methyl-N6-Bz-deoxyadenosine TP | — | A | NO |
| 2′-a-Ethynyladenosine TP | — | A | NO |
| 2-aminoadenine | — | A | NO |
| 2-Aminoadenosine TP | — | A | NO |
| 2-Amino-ATP | — | A | NO |
| 2′-a-Trifluoromethyladenosine TP | — | A | NO |
| 2-Azidoadenosine TP | — | A | NO |
| 2′-b-Ethynyladenosine TP | — | A | NO |
| 2-Bromoadenosine TP | — | A | NO |
| 2′-b-Trifluoromethyladenosine TP | — | A | NO |
| 2-Chloroadenosine TP | — | A | NO |
| 2′-Deoxy-2′,2′-difluoroadenosine TP | — | A | NO |
| 2′-Deoxy-2′-a-mercaptoadenosine TP | — | A | NO |
| 2′-Deoxy-2′-a-thiomethoxyadenosine TP | — | A | NO |
| 2′-Deoxy-2′-b-aminoadenosine TP | — | A | NO |
| 2′-Deoxy-2′-b-azidoadenosine TP | — | A | NO |
| 2′-Deoxy-2′-b-bromoadenosine TP | — | A | NO |
| 2′-Deoxy-2′-b-chloroadenosine TP | — | A | NO |
| 2′-Deoxy-2′-b-fluoroadenosine TP | — | A | NO |
| 2′-Deoxy-2′-b-iodoadenosine TP | — | A | NO |
| 2′-Deoxy-2′-b-mercaptoadenosine TP | — | A | NO |
| 2′-Deoxy-2′-b-thiomethoxyadenosine TP | — | A | NO |
| 2-Fluoroadenosine TP | — | A | NO |
| 2-Iodoadenosine TP | — | A | NO |
| 2-Mercaptoadenosine TP | — | A | NO |
| 2-methoxy-adenine | — | A | NO |
| 2-methylthio-adenine | — | A | NO |
| 2-Trifluoromethyladenosine TP | — | A | NO |
| 3-Deaza-3-bromoadenosine TP | — | A | NO |
| 3-Deaza-3-chloroadenosine TP | — | A | NO |
| 3-Deaza-3-fluoroadenosine TP | — | A | NO |
| 3-Deaza-3-iodoadenosine TP | — | A | NO |
| 3-Deazaadenosine TP | — | A | NO |
| 4′-Azidoadenosine TP | — | A | NO |
| 4′-Carbocyclic adenosine TP | — | A | NO |
| 4′-Ethynyladenosine TP | — | A | NO |
| 5′-Homo-adenosine TP | — | A | NO |
| 8-Aza-ATP | — | A | NO |
| 8-bromo-adenosine TP | — | A | NO |
| 8-Trifluoromethyladenosine TP | — | A | NO |
| 9-Deazaadenosine TP | — | A | NO |
| 2-aminopurine | — | A/G | NO |
| 7-deaza-2,6-diaminopurine | — | A/G | NO |
| 7-deaza-8-aza-2,6-diaminopurine | — | A/G | NO |
| 7-deaza-8-aza-2-aminopurine | — | A/G | NO |
| 2,6-diaminopurine | — | A/G | NO |
| 7-deaza-8-aza-adenine, 7-deaza-2-aminopurine | — | A/G | NO |
| 2-thiocytidine | s2C | C | YES |
| 3-methylcytidine | m3C | C | YES |
| 5-formylcytidine | f5C | C | YES |
| 5-hydroxymethylcytidine | hm5C | C | YES |
| 5-methylcytidine | m5C | C | YES |
| N4-acetylcytidine | ac4C | C | YES |
| 2′-O-methylcytidine | Cm | C | YES |
| 2′-O-methylcytidine | Cm | C | YES |
| 5,2′-O-dimethylcytidine | m5 Cm | C | YES |
| 5-formyl-2′-O-methylcytidine | f5Cm | C | YES |
| lysidine | k2C | C | YES |
| N4,2′-O-dimethylcytidine | m4Cm | C | YES |
| N4-acetyl-2′-O-methylcytidine | ac4Cm | C | YES |
| N4-methylcytidine | m4C | C | YES |
| N4,N4-Dimethyl-2′-OMe-Cytidine TP | — | C | YES |
| 4-methylcytidine | — | C | NO |
| 5-aza-cytidine | — | C | NO |
| Pseudo-iso-cytidine | — | C | NO |
| pyrrolo-cytidine | — | C | NO |
| α-thio-cytidine | — | C | NO |
| 2-(thio)cytosine | — | C | NO |
| 2′-Amino-2′-deoxy-CTP | — | C | NO |
| 2′-Azido-2′-deoxy-CTP | — | C | NO |
| 2′-Deoxy-2′-a-aminocytidine TP | — | C | NO |
| 2′-Deoxy-2′-a-azidocytidine TP | — | C | NO |
| 3 (deaza) 5 (aza)cytosine | — | C | NO |
| 3 (methyl)cytosine | — | C | NO |
| 3-(alkyl)cytosine | — | C | NO |
| 3-(deaza) 5 (aza)cytosine | — | C | NO |
| 3-(methyl)cytidine | — | C | NO |
| 4,2′-O-dimethylcytidine | — | C | NO |
| 5 (halo)cytosine | — | C | NO |
| 5 (methyl)cytosine | — | C | NO |
| 5 (propynyl)cytosine | — | C | NO |
| 5 (trifluoromethyl)cytosine | — | C | NO |
| 5-(alkyl)cytosine | — | C | NO |
| 5-(alkynyl)cytosine | — | C | NO |
| 5-(halo)cytosine | — | C | NO |
| 5-(propynyl)cytosine | — | C | NO |
| 5-(trifluoromethyl)cytosine | — | C | NO |
| 5-bromo-cytidine | — | C | NO |
| 5-iodo-cytidine | — | C | NO |
| 5-propynyl cytosine | — | C | NO |
| 6-(azo)cytosine | — | C | NO |
| 6-aza-cytidine | — | C | NO |
| aza cytosine | — | C | NO |
| deaza cytosine | — | C | NO |
| N4 (acetyl)cytosine | — | C | NO |
| 1-methyl-1-deaza-pseudoisocytidine | — | C | NO |
| 1-methyl-pseudoisocytidine | — | C | NO |
| 2-methoxy-5-methyl-cytidine | — | C | NO |
| 2-methoxy-cytidine | — | C | NO |
| 2-thio-5-methyl-cytidine | — | C | NO |
| 4-methoxy-1-methyl-pseudoisocytidine | — | C | NO |
| 4-methoxy-pseudoisocytidine | — | C | NO |
| 4-thio-1-methyl-1-deaza-pseudoisocytidine | — | C | NO |
| 4-thio-1-methyl-pseudoisocytidine | — | C | NO |
| 4-thio-pseudoisocytidine | — | C | NO |
| 5-aza-zebularine | — | C | NO |
| 5-methyl-zebularine | — | C | NO |
| pyrrolo-pseudoisocytidine | — | C | NO |
| zebularine | — | C | NO |
| (E)-5-(2-Bromo-vinyl)cytidine TP | — | C | NO |
| 2,2′-anhydro-cytidine TP hydrochloride | — | C | NO |
| 2′Fluor-N4-Bz-cytidine TP | — | C | NO |
| 2′Fluoro-N4-Acetyl-cytidine TP | — | C | NO |
| 2′-O-Methyl-N4-Acetyl-cytidine TP | — | C | NO |
| 2′O-methyl-N4-Bz-cytidine TP | — | C | NO |
| 2′-a-Ethynylcytidine TP | — | C | NO |
| 2′-a-Trifluoromethylcytidine TP | — | C | NO |
| 2′-b-Ethynylcytidine TP | — | C | NO |
| 2′-b-Trifluoromethylcytidine TP | — | C | NO |
| 2′-Deoxy-2′,2′-difluorocytidine TP | — | C | NO |
| 2′-Deoxy-2′-a-mercaptocytidine TP | — | C | NO |
| 2′-Deoxy-2′-a-thiomethoxycytidine TP | — | C | NO |
| 2′-Deoxy-2′-b-aminocytidine TP | — | C | NO |
| 2′-Deoxy-2′-b-azidocytidine TP | — | C | NO |
| 2′-Deoxy-2′-b-bromocytidine TP | — | C | NO |
| 2′-Deoxy-2′-b-chlorocytidine TP | — | C | NO |
| 2′-Deoxy-2′-b-fluorocytidine TP | — | C | NO |
| 2′-Deoxy-2′-b-iodocytidine TP | — | C | NO |
| 2′-Deoxy-2′-b-mercaptocytidine TP | — | C | NO |
| 2′-Deoxy-2′-b-thiomethoxycytidine TP | — | C | NO |
| 2′-O-Methyl-5-(1-propynyl)cytidine TP | — | C | NO |
| 3′-Ethynylcytidine TP | — | C | NO |
| 4′-Azidocytidine TP | — | C | NO |
| 4′-Carbocyclic cytidine TP | — | C | NO |
| 4′-Ethynylcytidine TP | — | C | NO |
| 5-(1-Propynyl)ara-cytidine TP | — | C | NO |
| 5-(2-Chloro-phenyl)-2-thiocytidine TP | — | C | NO |
| 5-(4-Amino-phenyl)-2-thiocytidine TP | — | C | NO |
| 5-Aminoallyl-CTP | — | C | NO |
| 5-Cyanocytidine TP | — | C | NO |
| 5-Ethynylara-cytidine TP | — | C | NO |
| 5-Ethynylcytidine TP | — | C | NO |
| 5′-Homo-cytidine TP | — | C | NO |
| 5-Methoxycytidine TP | — | C | NO |
| 5-Trifluoromethyl-Cytidine TP | — | C | NO |
| N4-Amino-cytidine TP | — | C | NO |
| N4-Benzoyl-cytidine TP | — | C | NO |
| pseudoisocytidine | — | C | NO |
| 7-methylguanosine | m7G | G | YES |
| N2,2′-O-dimethylguanosine | m2Gm | G | YES |
| N2-methylguanosine | m2G | G | YES |
| wyosine | imG | G | YES |
| 1,2′-O-dimethylguanosine | m1Gm | G | YES |
| 1-methylguanosine | m1G | G | YES |
| 2′-O-methylguanosine | Gm | G | YES |
| 2′-O-ribosylguanosine (phosphate) | Gr(p) | G | YES |
| 2′-O-methylguanosine | Gm | G | YES |
| 2′-O-ribosylguanosine (phosphate) | Gr(p) | G | YES |
| 7-aminomethyl-7-deazaguanosine | preQ1 | G | YES |
| 7-cyano-7-deazaguanosine | preQ0 | G | YES |
| archaeosine | G+ | G | YES |
| methylwyosine | mimG | G | YES |
| N2,7-dimethylguanosine | m2,7G | G | YES |
| N2,N2,2′-O-trimethylguanosine | m22Gm | G | YES |
| N2,N2,7-trimethylguanosine | m2,2,7G | G | YES |
| N2,N2-dimethylguanosine | m22G | G | YES |
| N²,7,2′-O-trimethylguanosine | m^{2,7}Gm | G | YES |
| 6-thio-guanosine | — | G | NO |
| 7-deaza-guanosine | — | G | NO |
| 8-oxo-guanosine | — | G | NO |
| N1-methyl-guanosine | — | G | NO |
| α-thio-guanosine | — | G | NO |
| 2 (propyl)guanine | — | G | NO |
| 2-(alkyl)guanine | — | G | NO |
| 2′-Amino-2′-deoxy-GTP | — | G | NO |
| 2′-Azido-2′-deoxy-GTP | — | G | NO |
| 2′-Deoxy-2′-a-aminoguanosine TP | — | G | NO |
| 2′-Deoxy-2′-a-azidoguanosine TP | — | G | NO |
| 6 (methyl)guanine | — | G | NO |
| 6-(alkyl)guanine | — | G | NO |
| 6-(methyl)guanine | — | G | NO |
| 6-methyl-guanosine | — | G | NO |
| 7 (alkyl)guanine | — | G | NO |
| 7 (deaza)guanine | — | G | NO |
| 7 (methyl)guanine | — | G | NO |
| 7-(alkyl)guanine | — | G | NO |
| 7-(deaza)guanine | — | G | NO |
| 7-(methyl)guanine | — | G | NO |
| 8 (alkyl)guanine | — | G | NO |
| 8 (alkynyl)guanine | — | G | NO |
| 8 (halo)guanine | — | G | NO |
| 8 (thioalkyl)guanine | — | G | NO |
| 8-(alkenyl)guanine | — | G | NO |
| 8-(alkyl)guanine | — | G | NO |
| 8-(alkynyl)guanine | — | G | NO |
| 8-(amino)guanine | — | G | NO |
| 8-(halo)guanine | — | G | NO |
| 8-(hydroxyl)guanine | — | G | NO |
| 8-(thioalkyl)guanine | — | G | NO |
| 8-(thiol)guanine | — | G | NO |
| aza guanine | — | G | NO |
| deaza guanine | — | G | NO |
| N (methyl)guanine | — | G | NO |
| N-(methyl)guanine | — | G | NO |
| 1-methyl-6-thio-guanosine | — | G | NO |
| 6-methoxy-guanosine | — | G | NO |
| 6-thio-7-deaza-8-aza-guanosine | — | G | NO |
| 6-thio-7-deaza-guanosine | — | G | NO |
| 6-thio-7-methyl-guanosine | — | G | NO |
| 7-deaza-8-aza-guanosine | — | G | NO |
| 7-methyl-8-oxo-guanosine | — | G | NO |
| N2,N2-dimethyl-6-thio-guanosine | — | G | NO |
| N2-methyl-6-thio-guanosine | — | G | NO |
| 1-Me-GTP | — | G | NO |
| 2′Fluoro-N2-isobutyl-guanosine TP | — | G | NO |
| 2′O-methyl-N2-isobutyl-guanosine TP | — | G | NO |
| 2′-a-Ethynylguanosine TP | — | G | NO |
| 2′-a-Trifluoromethylguanosine TP | — | G | NO |
| 2′-b-Ethynylguanosine TP | — | G | NO |
| 2′-b-Trifluoromethylguanosine TP | — | G | NO |
| 2′-Deoxy-2′,2′-difluoroguanosine TP | — | G | NO |
| 2′-Deoxy-2′-a-mercaptoguanosine TP | — | G | NO |
| 2′-Deoxy-2′-a-thiomethoxyguanosine TP | — | G | NO |
| 2′-Deoxy-2′-b-aminoguanosine TP | — | G | NO |
| 2′-Deoxy-2′-b-azidoguanosine TP | — | G | NO |
| 2′-Deoxy-2′-b-bromoguanosine TP | — | G | NO |
| 2′-Deoxy-2′-b-chloroguanosine TP | — | G | NO |
| 2′-Deoxy-2′-b-fluoroguanosine TP | — | G | NO |
| 2′-Deoxy-2′-b-iodoguanosine TP | — | G | NO |
| 2′-Deoxy-2′-b-mercaptoguanosine TP | — | G | NO |
| 2′-Deoxy-2′-b-thiomethoxyguanosine TP | — | G | NO |
| 4′-Azidoguanosine TP | — | G | NO |
| 4′-Carbocyclic guanosine TP | — | G | NO |
| 4′-Ethynylguanosine TP | — | G | NO |
| 5′-Homo-guanosine TP | — | G | NO |
| 8-bromo-guanosine TP | — | G | NO |
| 9-Deazaguanosine TP | — | G | NO |
| N2-isobutyl-guanosine TP | — | G | NO |
| 1-methylinosine | m1I | I | YES |
| inosine | I | I | YES |
| 1,2′-O-dimethylinosine | m1Im | I | YES |
| 2′-O-methylinosine | Im | I | YES |
| 7-methylinosine | | I | NO |
| 2′-O-methylinosine | Im | I | YES |
| epoxyqueuosine | oQ | Q | YES |
| galactosyl-queuosine | galQ | Q | YES |
| mannosylqueuosine | manQ | Q | YES |
| queuosine | Q | Q | YES |
| allyamino-thymidine | — | T | NO |
| aza thymidine | — | T | NO |
| deaza thymidine | — | T | NO |
| deoxy-thymidine | — | T | NO |
| 2′-O-methyluridine | — | U | YES |
| 2-thiouridine | s2U | U | YES |
| 3-methyluridine | m3U | U | YES |
| 5-carboxymethyluridine | cm5U | U | YES |
| 5-hydroxyuridine | ho5U | U | YES |
| 5-methyluridine | m5U | U | YES |
| 5-taurinomethyl-2-thiouridine | τm5s2U | U | YES |
| 5-taurinomethyluridine | τm5U | U | YES |
| dihydrouridine | D | U | YES |
| pseudouridine | Ψ | U | YES |
| (3-(3-amino-3-carboxypropyl)uridine | acp3U | U | YES |
| 1-methyl-3-(3-amino-5- | m1acp3Ψ | U | YES |
| carboxypropyl)pseudouridine | | | |
| 1-methylpseduouridine | m1Ψ | U | YES |
| 1-methyl-pseudouridine | — | U | YES |
| 2′-O-methyluridine | Um | U | YES |
| 2′-O-methylpseudouridine | Ψm | U | YES |
| 2′-O-methyluridine | Um | U | YES |
| 2-thio-2′-O-methyluridine | s2Um | U | YES |
| 3-(3-amino-3-carboxypropyl)uridine | acp3U | U | YES |
| 3,2′-O-dimethyluridine | m3Um | U | YES |
| 3-Methyl-pseudo-Uridine TP | — | U | YES |
| 4-thiouridine | s4U | U | YES |
| 5-(carboxyhydroxymethyl)uridine | chm5U | U | YES |
| 5-(carboxyhydroxymethyl)uridine methyl ester | mchm5U | U | YES |
| 5,2′-O-dimethyluridine | m5Um | U | YES |
| 5,6-dihydro-uridine | — | U | YES |
| 5-aminomethyl-2-thiouridine | nm5s2U | U | YES |
| 5-carbamoylmethyl-2′-O-methyluridine | ncm5Um | U | YES |
| 5-carbamoylmethyluridine | ncm5U | U | YES |
| 5-carboxyhydroxymethyluridine | — | U | YES |
| 5-carboxyhydroxymethyluridine methyl ester | — | U | YES |
| 5-carboxymethylaminomethyl-2′-O- | cmnm5Um | U | YES |
| methyluridine | | | |
| 5-carboxymethylaminomethyl-2-thiouridine | cmnm5s2U | U | YES |
| 5-carboxymethylaminomethyl-2-thiouridine | — | U | YES |
| 5-carboxymethylaminomethyluridine | cmnm5U | U | YES |
| 5-carboxymethylaminomethyluridine | — | U | YES |
| 5-Carbamoylmethyluridine TP | — | U | YES |
| 5-methoxycarbonylmethyl-2′-O-methyluridine | mcm5Um | U | YES |
| 5-methoxycarbonylmethyl-2-thiouridine | mcm5s2U | U | YES |
| 5-methoxycarbonylmethyluridine | mcm5U | U | YES |
| 5-methoxyuridine | mo5U | U | YES |
| 5-methyl-2-thiouridine | m5s2U | U | YES |
| 5-methylaminomethyl-2-selenouridine | mnm5se2U | U | YES |
| 5-methylaminomethyl-2-thiouridine | mnm5s2U | U | YES |
| 5-methylaminomethyluridine | mnm5U | U | YES |
| 5-Methyldihydrouridine | — | U | YES |
| 5-Oxyacetic acid-Uridine TP | — | U | YES |
| 5-Oxyacetic acid-methyl ester-Uridine TP | — | U | YES |
| N1-methyl-pseudo-uridine | — | U | YES |
| uridine 5-oxyacetic acid | cmo5U | U | YES |
| uridine 5-oxyacetic acid methyl ester | mcmo5U | U | YES |
| 3-(3-Amino-3-carboxypropyl)-Uridine TP | — | U | YES |
| 5-(iso-Pentenylaminomethyl)-2-thiouridine | — | U | YES |
| TP | | | |
| 5-(iso-Pentenylaminomethyl)-2′-O- | — | U | YES |
| methyluridine TP | | | |
| 5-(iso-Pentenylaminomethyl)uridine TP | — | U | YES |
| 5-propynyl uracil | — | U | NO |
| α-thio-uridine | — | U | NO |
| 1 (aminoalkylamino-carbonylethylenyl)- | — | U | NO |
| 2(thio)-pseudouracil | | | |
| 1 (aminoalkylaminocarbonylethylenyl)-2,4- | — | U | NO |
| (dithio)pseudouracil | | | |
| 1 (aminoalkylaminocarbonylethylenyl)-4 | — | U | NO |
| (thio)pseudouracil | | | |
| 1 (aminoalkylaminocarbonylethylenyl)- | — | U | NO |
| pseudouracil | | | |
| 1 (aminocarbonylethylenyl)-2(thio)- | — | U | NO |
| pseudouracil | | | |
| 1 (aminocarbonylethylenyl)-2,4- | — | U | NO |
| (dithio)pseudouracil | | | |
| 1 (aminocarbonylethylenyl)-4 | — | U | NO |
| (thio)pseudouracil | | | |
| 1 (aminocarbonylethylenyl)-pseudouracil | — | U | NO |
| 1 substituted 2(thio)-pseudouracil | — | U | NO |
| 1 substituted 2,4-(dithio)pseudouracil | — | U | NO |
| 1 substituted 4 (thio)pseudouracil | — | U | NO |
| 1 substituted pseudouracil | — | U | NO |
| 1-(aminoalkylamino-carbonylethylenyl)-2- | — | U | NO |
| (thio)-pseudouracil | | | |
| 1-Methyl-3-(3-amino-3-carboxypropyl) | — | U | NO |
| pseudouridine TP | | | |
| 1-Methyl-3-(3-amino-3- | — | U | NO |
| carboxypropyl)pseudo-UTP | | | |
| 1-Methyl-pseudo-UTP | — | U | NO |
| 2 (thio)pseudouracil | — | U | NO |
| 2′ deoxy uridine | — | U | NO |
| 2′ fluorouridine | — | U | NO |
| 2-(thio)uracil | — | U | NO |
| 2,4-(dithio)psuedouracil | — | U | NO |
| 2′ methyl, 2′amino, 2′azido, 2′fluro-guanosine | — | U | NO |
| 2′-Amino-2′-deoxy-UTP | — | U | NO |
| 2′-Azido-2′-deoxy-UTP | — | U | NO |
| 2′-Azido-deoxyuridine TP | — | U | NO |
| 2′-O-methylpseudouridine | — | U | NO |
| 2′ deoxy uridine | 2′ dU | U | NO |
| 2′ fluorouridine | — | U | NO |
| 2′-Deoxy-2′-a-aminouridine TP | — | U | NO |
| 2′-Deoxy-2′-a-azidouridine TP | — | U | NO |
| 2-methylpseudouridine | m3Ψ | U | NO |
| 3 (3 amino-3 carboxypropyl)uracil | — | U | NO |
| 4 (thio)pseudouracil | — | U | NO |
| 4-(thio)pseudouracil | — | U | NO |
| 4-(thio)uracil | — | U | NO |
| 4-thiouracil | — | U | NO |
| 5 (1,3-diazole-1-alkyl)uracil | — | U | NO |
| 5 (2-aminopropyl)uracil | — | U | NO |
| 5 (aminoalkyl)uracil | — | U | NO |
| 5 (dimethylaminoalkyl)uracil | — | U | NO |
| 5 (guanidiniumalkyl)uracil | — | U | NO |
| 5 (methoxycarbonylmethyl)-2-(thio)uracil | — | U | NO |
| 5 (methoxycarbonyl-methyl)uracil | — | U | NO |
| 5 (methyl) 2 (thio)uracil | — | U | NO |
| 5 (methyl) 2,4 (dithio)uracil | — | U | NO |
| 5 (methyl) 4 (thio)uracil | — | U | NO |
| 5 (methylaminomethyl)-2 (thio)uracil | — | U | NO |
| 5 (methylaminomethyl)-2,4 (dithio)uracil | — | U | NO |
| 5 (methylaminomethyl)-4 (thio)uracil | — | U | NO |
| 5 (propynyl)uracil | — | U | NO |
| 5 (trifluoromethyl)uracil | — | U | NO |
| 5-(2-aminopropyl)uracil | — | U | NO |
| 5-(alkyl)-2-(thio)pseudouracil | — | U | NO |
| 5-(alkyl)-2,4 (dithio)pseudouracil | — | U | NO |
| 5-(alkyl)-4 (thio)pseudouracil | — | U | NO |
| 5-(alkyl)pseudouracil | — | U | NO |
| 5-(alkyl)uracil | — | U | NO |
| 5-(alkynyl)uracil | — | U | NO |
| 5-(allylamino)uracil | — | U | NO |
| 5-(cyanoalkyl)uracil | — | U | NO |
| 5-(dialkylaminoalkyl)uracil | — | U | NO |
| 5-(dimethylaminoalkyl)uracil | — | U | NO |
| 5-(guanidiniumalkyl)uracil | — | U | NO |
| 5-(halo)uracil | — | U | NO |
| 5-(1,3-diazole-1-alkyl)uracil | — | U | NO |
| 5-(methoxy)uracil | — | U | NO |
| 5-(methoxycarbonylmethyl)-2-(thio)uracil | — | U | NO |
| 5-(methoxycarbonyl-methyl)uracil | — | U | NO |
| 5-(methyl) 2(thio)uracil | — | U | NO |
| 5-(methyl) 2,4 (dithio)uracil | — | U | NO |
| 5-(methyl) 4 (thio)uracil | — | U | NO |
| 5-(methyl)-2-(thio)pseudouracil | — | U | NO |
| 5-(methyl)-2,4 (dithio)pseudouracil | — | U | NO |
| 5-(methyl)-4 (thio)pseudouracil | — | U | NO |
| 5-(methyl)pseudouracil | — | U | NO |
| 5-(methylaminomethyl)-2 (thio)uracil | — | U | NO |
| 5-(methylaminomethyl)-2,4(dithio)uracil | — | U | NO |
| 5-(methylaminomethyl)-4-(thio)uracil | — | U | NO |
| 5-(propynyl)uracil | — | U | NO |
| 5-(trifluoromethyl)uracil | — | U | NO |
| 5-aminoallyl-uridine | — | U | NO |
| 5-bromo-uridine | — | U | NO |
| 5-iodo-uridine | — | U | NO |
| 5-uracil | — | U | NO |
| 6 (azo)uracil | — | U | NO |
| 6-(azo)uracil | — | U | NO |
| 6-aza-uridine | — | U | NO |
| allyamino-uracil | — | U | NO |
| aza uracil | — | U | NO |
| deaza uracil | — | U | NO |
| N3 (methyl)uracil | — | U | NO |
| Pseudo-UTP-1-2-ethanoic acid | — | U | NO |
| pseudouracil | — | U | NO |
| 4-Thio-pseudo-UTP | — | U | NO |
| 1-carboxymethyl-pseudouridine | — | U | NO |
| 1-methyl-1-deaza-pseudouridine | — | U | NO |
| 1-propynyl-uridine | — | U | NO |
| 1-taurinomethyl-1-methyl-uridine | — | U | NO |
| 1-taurinomethyl-4-thio-uridine | — | U | NO |
| 1-taurinomethyl-pseudouridine | — | U | NO |
| 2-methoxy-4-thio-pseudouridine | — | U | NO |
| 2-thio-1-methyl-1-deaza-pseudouridine | — | U | NO |
| 2-thio-1-methyl-pseudouridine | — | U | NO |
| 2-thio-5-aza-uridine | — | U | NO |
| 2-thio-dihydropseudouridine | — | U | NO |
| 2-thio-dihydrouridine | — | U | NO |
| 2-thio-pseudouridine | — | U | NO |
| 4-methoxy-2-thio-pseudouridine | — | U | NO |
| 4-methoxy-pseudouridine | — | U | NO |
| 4-thio-1-methyl-pseudouridine | — | U | NO |
| 4-thio-pseudouridine | — | U | NO |
| 5-aza-uridine | — | U | NO |
| dihydropseudouridine | — | U | NO |
| (±)1-(2-Hydroxypropyl)pseudouridine TP | — | U | NO |
| (2R)-1-(2-Hydroxypropyl)pseudouridine TP | — | U | NO |
| (2S)-1-(2-Hydroxypropyl)pseudouridine TP | — | U | NO |
| (E)-5-(2-Bromo-vinyl)ara-uridine TP | — | U | NO |
| (E)-5-(2-Bromo-vinyl)uridine TP | — | U | NO |
| (Z)-5-(2-Bromo-vinyl)ara-uridine TP | — | U | NO |
| (Z)-5-(2-Bromo-vinyl)uridine TP | — | U | NO |
| 1-(2,2,2-Trifluoroethyl)-pseudo-UTP | — | U | NO |
| 1-(2,2,3,3,3-Pentafluoropropyl)pseudouridine | — | U | NO |
| TP | | | |
| 1-(2,2-Diethoxyethyl)pseudouridine TP | — | U | NO |
| 1-(2,4,6-Trimethylbenzyl)pseudouridine TP | — | U | NO |
| 1-(2,4,6-Trimethyl-benzyl)pseudo-UTP | — | U | NO |
| 1-(2,4,6-Trimethyl-phenyl)pseudo-UTP | — | U | NO |
| 1-(2-Amino-2-carboxyethyl)pseudo-UTP | — | U | NO |
| 1-(2-Amino-ethyl)pseudo-UTP | — | U | NO |
| 1-(2-Hydroxyethyl)pseudouridine TP | — | U | NO |
| 1-(2-Methoxyethyl)pseudouridine TP | — | U | NO |
| 1-(3,4-Bis- | — | U | NO |
| trifluoromethoxybenzyl)pseudouridine TP | | | |
| 1-(3,4-Dimethoxybenzyl)pseudouridine TP | — | U | NO |
| 1-(3-Amino-3-carboxypropyl)pseudo-UTP | — | U | NO |
| 1-(3-Amino-propyl)pseudo-UTP | — | U | NO |
| 1-(3-Cyclopropyl-prop-2-ynyl)pseudouridine | — | U | NO |
| TP | | | |
| 1-(4-Amino-4-carboxybutyl)pseudo-UTP | — | U | NO |
| 1-(4-Amino-benzyl)pseudo-UTP | — | U | NO |
| 1-(4-Amino-butyl)pseudo-UTP | — | U | NO |
| 1-(4-Amino-phenyl)pseudo-UTP | — | U | NO |
| 1-(4-Azidobenzyl)pseudouridine TP | — | U | NO |
| 1-(4-Bromobenzyl)pseudouridine TP | — | U | NO |
| 1-(4-Chlorobenzyl)pseudouridine TP | — | U | NO |
| 1-(4-Fluorobenzyl)pseudouridine TP | — | U | NO |
| 1-(4-Iodobenzyl)pseudouridine TP | — | U | NO |
| 1-(4-Methanesulfonylbenzyl)pseudouridine TP | — | U | NO |
| 1-(4-Methoxybenzyl)pseudouridine TP | — | U | NO |
| 1-(4-Methoxy-benzyl)pseudo-UTP | — | U | NO |
| 1-(4-Methoxy-phenyl)pseudo-UTP | — | U | NO |
| 1-(4-Methylbenzyl)pseudouridine TP | — | U | NO |
| 1-(4-Methyl-benzyl)pseudo-UTP | — | U | NO |
| 1-(4-Nitrobenzyl)pseudouridine TP | — | U | NO |
| 1-(4-Nitro-benzyl)pseudo-UTP | — | U | NO |
| 1(4-Nitro-phenyl)pseudo-UTP | — | U | NO |
| 1-(4-Thiomethoxybenzyl)pseudouridine TP | — | U | NO |
| 1-(4-Trifluoromethoxybenzyl)pseudouridine | — | U | NO |
| TP | | | |
| 1-(4-Trifluoromethylbenzyl)pseudouridine TP | — | U | NO |
| 1-(5-Amino-pentyl)pseudo-UTP | — | U | NO |
| 1-(6-Amino-hexyl)pseudo-UTP | — | U | NO |
| 1,6-Dimethyl-pseudo-UTP | — | U | NO |
| 1-[3-(2-{2-[2-(2-Aminoethoxy)-ethoxy]- | — | U | NO |
| ethoxy}-ethoxy)-propionyl]pseudouridine TP | | | |
| 1-{3-[2-(2-Aminoethoxy)-ethoxy]-propionyl} | — | U | NO |
| pseudouridine TP | | | |
| 1-Acetylpseudouridine TP | — | U | NO |
| 1-Alkyl-6-(1-propynyl)-pseudo-UTP | — | U | NO |
| 1-Alkyl-6-(2-propynyl)-pseudo-UTP | — | U | NO |
| 1-Alkyl-6-allyl-pseudo-UTP | — | U | NO |
| 1-Alkyl-6-ethynyl-pseudo-UTP | — | U | NO |
| 1-Alkyl-6-homoallyl-pseudo-UTP | — | U | NO |
| 1-Alkyl-6-vinyl-pseudo-UTP | — | U | NO |
| 1-Allylpseudouridine TP | — | U | NO |
| 1-Aminomethyl-pseudo-UTP | — | U | NO |
| 1-Benzoylpseudouridine TP | — | U | NO |
| 1-Benzyloxymethylpseudouridine TP | — | U | NO |
| 1-Benzyl-pseudo-UTP | — | U | NO |
| 1-Biotinyl-PEG2-pseudouridine TP | — | U | NO |
| 1-Biotinylpseudouridine TP | — | U | NO |
| 1-Butyl-pseudo-UTP | — | U | NO |
| 1-Cyanomethylpseudouridine TP | — | U | NO |
| 1-Cyclobutylmethyl-pseudo-UTP | — | U | NO |
| 1-Cyclobutyl-pseudo-UTP | — | U | NO |
| 1-Cycloheptylmethyl-pseudo-UTP | — | U | NO |
| 1-Cycloheptyl-pseudo-UTP | — | U | NO |
| 1-Cyclohexylmethyl-pseudo-UTP | — | U | NO |
| 1-Cyclohexyl-pseudo-UTP | — | U | NO |
| 1-Cyclooctylmethyl-pseudo-UTP | — | U | NO |
| 1-Cyclooctyl-pseudo-UTP | — | U | NO |
| 1-Cyclopentylmethyl-pseudo-UTP | — | U | NO |
| 1-Cyclopentyl-pseudo-UTP | — | U | NO |
| 1-Cyclopropylmethyl-pseudo-UTP | — | U | NO |
| 1-Cyclopropyl-pseudo-UTP | — | U | NO |
| 1-Ethyl-pseudo-UTP | — | U | NO |
| 1-Hexyl-pseudo-UTP | — | U | NO |
| 1-Homoallylpseudouridine TP | — | U | NO |
| 1-Hydroxymethylpseudouridine TP | — | U | NO |
| 1-iso-propyl-pseudo-UTP | — | U | NO |
| 1-Me-2-thio-pseudo-UTP | — | U | NO |
| 1-Me-4-thio-pseudo-UTP | — | U | NO |
| 1-Me-alpha-thio-pseudo-UTP | — | U | NO |
| 1-Methanesulfonylmethylpseudouridine TP | — | U | NO |
| 1-Methoxymethylpseudouridine TP | — | U | NO |
| 1-Methyl-6-(2,2,2-Trifluoroethyl)pseudo-UTP | — | U | NO |
| 1-Methyl-6-(4-morpholino)-pseudo-UTP | — | U | NO |
| 1-Methyl-6-(4-thiomorpholino)-pseudo-UTP | — | U | NO |
| 1-Methyl-6-(substituted phenyl)pseudo-UTP | — | U | NO |
| 1-Methyl-6-amino-pseudo-UTP | — | U | NO |
| 1-Methyl-6-azido-pseudo-UTP | — | U | NO |
| 1-Methyl-6-bromo-pseudo-UTP | — | U | NO |
| 1-Methyl-6-butyl-pseudo-UTP | — | U | NO |
| 1-Methyl-6-chloro-pseudo-UTP | — | U | NO |
| 1-Methyl-6-cyano-pseudo-UTP | — | U | NO |
| 1-Methyl-6-dimethylamino-pseudo-UTP | — | U | NO |
| 1-Methyl-6-ethoxy-pseudo-UTP | — | U | NO |
| 1-Methyl-6-ethylcarboxylate-pseudo-UTP | — | U | NO |
| 1-Methyl-6-ethyl-pseudo-UTP | — | U | NO |
| 1-Methyl-6-fluoro-pseudo-UTP | — | U | NO |
| 1-Methyl-6-formyl-pseudo-UTP | — | U | NO |
| 1-Methyl-6-hydroxyamino-pseudo-UTP | — | U | NO |
| 1-Methyl-6-hydroxy-pseudo-UTP | — | U | NO |
| 1-Methyl-6-iodo-pseudo-UTP | — | U | NO |
| 1-Methyl-6-iso-propyl-pseudo-UTP | — | U | NO |
| 1-Methyl-6-methoxy-pseudo-UTP | — | U | NO |
| 1-Methyl-6-methylamino-pseudo-UTP | — | U | NO |
| 1-Methyl-6-phenyl-pseudo-UTP | — | U | NO |
| 1-Methyl-6-propyl-pseudo-UTP | — | U | NO |
| 1-Methyl-6-tert-butyl-pseudo-UTP | — | U | NO |
| 1-Methyl-6-trifluoromethoxy-pseudo-UTP | — | U | NO |
| 1-Methyl-6-trifluoromethyl-pseudo-UTP | — | U | NO |
| 1-Morpholinomethylpseudouridine TP | — | U | NO |
| 1-Pentyl-pseudo-UTP | — | U | NO |
| 1-Phenyl-pseudo-UTP | — | U | NO |
| 1-Pivaloylpseudouridine TP | — | U | NO |
| 1-Propargylpseudouridine TP | — | U | NO |
| 1-Propyl-pseudo-UTP | — | U | NO |
| 1-propynyl-pseudouridine | — | U | NO |
| 1-p-tolyl-pseudo-UTP | — | U | NO |
| 1-tert-Butyl-pseudo-UTP | — | U | NO |
| 1-Thiomethoxymethylpseudouridine TP | — | U | NO |
| 1-Thiomorpholinomethylpseudouridine TP | — | U | NO |
| 1-Trifluoroacetylpseudouridine TP | — | U | NO |
| 1-Trifluoromethyl-pseudo-UTP | — | U | NO |
| 1-Vinylpseudouridine TP | — | U | NO |
| 2,2′-anhydro-uridine TP | — | U | NO |
| 2′-bromo-deoxyuridine TP | — | U | NO |
| 2′-F-5-Methyl-2′-deoxy-UTP | — | U | NO |
| 2′-OMe-5-Me-UTP | — | U | NO |
| 2′-OMe-pseudo-UTP | — | U | NO |
| 2′-a-Ethynyluridine TP | — | U | NO |
| 2′-a-Trifluoromethyluridine TP | — | U | NO |
| 2′-b-Ethynyluridine TP | — | U | NO |
| 2′-b-Trifluoromethyluridine TP | — | U | NO |
| 2′-Deoxy-2′,2′-difluorouridine TP | — | U | NO |
| 2′-Deoxy-2′-a-mercaptouridine TP | — | U | NO |
| 2′-Deoxy-2′-a-thiomethoxyuridine TP | — | U | NO |
| 2′-Deoxy-2′-b-aminouridine TP | — | U | NO |
| 2′-Deoxy-2′-b-azidouridine TP | — | U | NO |
| 2′-Deoxy-2′-b-bromouridine TP | — | U | NO |
| 2′-Deoxy-2′-b-chlorouridine TP | — | U | NO |
| 2′-Deoxy-2′-b-fluorouridine TP | — | U | NO |
| 2′-Deoxy-2′-b-iodouridine TP | — | U | NO |
| 2′-Deoxy-2′-b-mercaptouridine TP | — | U | NO |
| 2′-Deoxy-2′-b-thiomethoxyuridine TP | — | U | NO |
| 2-methoxy-4-thio-uridine | — | U | NO |
| 2-methoxyuridine | — | U | NO |
| 2′-O-Methyl-5-(1-propynyl)uridine TP | — | U | NO |
| 3-Alkyl-pseudo-UTP | — | U | NO |
| 4′-Azidouridine TP | — | U | NO |
| 4′-Carbocyclic uridine TP | — | U | NO |
| 4′-Ethynyluridine TP | — | U | NO |
| 5-(1-Propynyl)ara-uridine TP | — | U | NO |
| 5-(2-Furanyl)uridine TP | — | U | NO |
| 5-Cyanouridine TP | — | U | NO |
| 5-Dimethylaminouridine TP | — | U | NO |
| 5′-Homo-uridine TP | — | U | NO |
| 5-iodo-2′-fluoro-deoxyuridine TP | — | U | NO |
| 5-Phenylethynyluridine TP | — | U | NO |
| 5-Trideuteromethyl-6-deuterouridine TP | — | U | NO |
| 5-Trifluoromethyl-Uridine TP | — | U | NO |
| 5-Vinylarauridine TP | — | U | NO |
| 6-(2,2,2-Trifluoroethyl)-pseudo-UTP | — | U | NO |
| 6-(4-Morpholino)-pseudo-UTP | — | U | NO |
| 6-(4-Thiomorpholino)-pseudo-UTP | — | U | NO |
| 6-(Substituted-Phenyl)-pseudo-UTP | — | U | NO |
| 6-Amino-pseudo-UTP | — | U | NO |
| 6-Azido-pseudo-UTP | — | U | NO |
| 6-Bromo-pseudo-UTP | — | U | NO |
| 6-Butyl-pseudo-UTP | — | U | NO |
| 6-Chloro-pseudo-UTP | — | U | NO |
| 6-Cyano-pseudo-UTP | — | U | NO |
| 6-Dimethylamino-pseudo-UTP | — | U | NO |
| 6-Ethoxy-pseudo-UTP | — | U | NO |
| 6-Ethylcarboxylate-pseudo-UTP | — | U | NO |
| 6-Ethyl-pseudo-UTP | — | U | NO |
| 6-Fluoro-pseudo-UTP | — | U | NO |
| 6-Formyl-pseudo-UTP | — | U | NO |
| 6-Hydroxyamino-pseudo-UTP | — | U | NO |
| 6-Hydroxy-pseudo-UTP | — | U | NO |
| 6-Iodo-pseudo-UTP | — | U | NO |
| 6-iso-Propyl-pseudo-UTP | — | U | NO |
| 6-Methoxy-pseudo-UTP | — | U | NO |
| 6-Methylamino-pseudo-UTP | — | U | NO |
| 6-Methyl-pseudo-UTP | — | U | NO |
| 6-Phenyl-pseudo-UTP | — | U | NO |
| 6-Phenyl-pseudo-UTP | — | U | NO |
| 6-Propyl-pseudo-UTP | — | U | NO |
| 6-tert-Butyl-pseudo-UTP | — | U | NO |
| 6-Trifluoromethoxy-pseudo-UTP | — | U | NO |
| 6-Trifluoromethyl-pseudo-UTP | — | U | NO |
| Alpha-thio-pseudo-UTP | — | U | NO |
| Pseudouridine 1-(4-methylbenzenesulfonic | — | U | NO |
| acid) TP | | | |
| Pseudouridine 1-(4-methylbenzoic acid) TP | — | U | NO |
| Pseudouridine TP 1-[3-(2-ethoxy)]propionic | — | U | NO |
| acid | | | |
| Pseudouridine TP 1-[3-{2-(2-[2-(2-ethoxy)- | — | U | NO |
| ethoxy]-ethoxy)-ethoxy}]propionic acid | | | |
| Pseudouridine TP 1-[3-{2-(2-[2-{2(2-ethoxy)- | — | U | NO |
| ethoxy}-ethoxy]-ethoxy)-ethoxy}]propionic | | | |
| acid | | | |
| Pseudouridine TP 1-[3-{2-(2-[2-ethoxy]- | — | U | NO |
| ethoxy)-ethoxy}]propionic acid | | | |
| Pseudouridine TP 1-[3-{2-(2-ethoxy)-ethoxy}] | — | U | NO |
| propionic acid | | | |
| Pseudouridine TP 1-methylphosphonic acid | — | U | NO |
| Pseudouridine TP 1-methylphosphonic acid | — | U | NO |
| diethyl ester | | | |
| Pseudo-UTP-N1-3-propionic acid | — | U | NO |
| Pseudo-UTP-N1-4-butanoic acid | — | U | NO |
| Pseudo-UTP-N1-5-pentanoic acid | — | U | NO |
| Pseudo-UTP-N1-6-hexanoic acid | — | U | NO |
| Pseudo-UTP-N1-7-heptanoic acid | — | U | NO |
| Pseudo-UTP-N1-methyl-p-benzoic acid | — | U | NO |
| Pseudo-UTP-N1-p-benzoic acid | — | U | NO |
| wybutosine | yW | W | YES |
| hydroxywybutosine | OHyW | W | YES |
| isowyosine | imG2 | W | YES |
| peroxywybutosine | o2yW | W | YES |
| undermodified hydroxywybutosine | OHyW* | W | YES |
| 4-demethylwyosine | imG-14 | W | YES |

[0322] Other modifications which may be useful in the polynucleotides of the present invention are listed in Table 6.

TABLE 6
Additional Modification types

| Name | Type |
|---|---|
| 2,6-(diamino)purine | Other |
| 1-(aza)-2-(thio)-3-(aza)-phenoxazin-1-yl | Other |
| 1,3-(diaza)-2-(oxo)-phenthiazin-1-yl | Other |
| 1,3-(diaza)-2-(oxo)-phenoxazin-1-yl | Other |
| 1,3,5-(triaza)-2,6-(dioxa)-naphthalene | Other |
| 2 (amino)purine | Other |
| 2,4,5-(trimethyl)phenyl | Other |
| 2′ methyl, 2′amino, 2′azido, 2′fluro-cytidine | Other |
| 2′ methyl, 2′amino, 2′azido, 2′fluro-adenine | Other |
| 2′methyl, 2′amino, 2′azido, 2′fluro-uridine | Other |
| 2′-amino-2′-deoxyribose | Other |
| 2-amino-6-Chloro-purine | Other |
| 2-aza-inosinyl | Other |
| 2′-azido-2′-deoxyribose | Other |
| 2′fluoro-2′-deoxyribose | Other |
| 2′-fluoro-modified bases | Other |
| 2′-O-methyl-ribose | Other |
| 2-oxo-7-aminopyridopyrimidin-3-yl | Other |
| 2-oxo-pyridopyrimidine-3-yl | Other |
| 2-pyridinone | Other |
| 3 nitropyrrole | Other |
| 3-(methyl)-7-(propynyl)isocarbostyrilyl | Other |
| 3-(methyl)isocarbostyrilyl | Other |
| 4-(fluoro)-6-(methyl)benzimidazole | Other |
| 4-(methyl)benzimidazole | Other |
| 4-(methyl)indolyl | Other |
| 4,6-(dimethyl)indolyl | Other |
| 5 nitroindole | Other |
| 5 substituted pyrimidines | Other |
| 5-(methyl)isocarbostyrilyl | Other |
| 5-nitroindole | Other |
| 6-(aza)pyrimidine | Other |
| 6-(azo)thymine | Other |
| 6-(methyl)-7-(aza)indolyl | Other |
| 6-chloro-purine | Other |
| 6-phenyl-pyrrolo-pyrimidin-2-on-3-yl | Other |
| 7-(aminoalkylhydroxy)-1-(aza)-2-(thio)-3-(aza)-phenthiazin-1-yl | Other |
| 7-(aminoalkylhydroxy)-1-(aza)-2-(thio)-3-(aza)-phenoxazin-1-yl | Other |
| 7-(aminoalkylhydroxy)-1,3-(diaza)-2-(oxo)-phenoxazin-1-yl | Other |
| 7-(aminoalkylhydroxy)-1,3-(diaza)-2-(oxo)-phenthiazin-1-yl | Other |
| 7-(aminoalkylhydroxy)-1,3-(diaza)-2-(oxo)-phenoxazin-1-yl | Other |
| 7-(aza)indolyl | Other |
| 7-(guanidiniumalkylhydroxy)-1-(aza)-2-(thio)-3-(aza)- | Other |
| phenoxazinl-yl | |
| 7-(guanidiniumalkylhydroxy)-1-(aza)-2-(thio)-3-(aza)- | Other |
| phenthiazin-1-yl | |
| 7-(guanidiniumalkylhydroxy)-1-(aza)-2-(thio)-3-(aza)- | Other |
| phenoxazin-1-yl | |
| 7-(guanidiniumalkylhydroxy)-1,3-(diaza)-2-(oxo)-phenoxazin-1-yl | Other |
| 7-(guanidiniumalkyl-hydroxy)-1,3-(diaza)-2-(oxo)-phenthiazin-1-yl | Other |
| 7-(guanidiniumalkylhydroxy)-1,3-(diaza)-2-(oxo)-phenoxazin-1-yl | Other |
| 7-(propynyl)isocarbostyrilyl | Other |
| 7-(propynyl)isocarbostyrilyl, propynyl-7-(aza)indolyl | Other |
| 7-deaza-inosinyl | Other |
| 7-substituted 1-(aza)-2-(thio)-3-(aza)-phenoxazin-1-yl | Other |
| 7-substituted 1,3-(diaza)-2-(oxo)-phenoxazin-1-yl | Other |
| 9-(methyl)-imidizopyridinyl | Other |
| aminoindolyl | Other |
| anthracenyl | Other |
| bis-ortho-(aminoalkylhydroxy)-6-phenyl-pyrrolo-pyrimidin- | Other |
| 2-on-3-yl | |
| bis-ortho-substituted-6-phenyl-pyrrolo-pyrimidin-2-on-3-yl | Other |
| difluorotolyl | Other |
| hypoxanthine | Other |
| imidizopyridinyl | Other |
| inosinyl | Other |
| isocarbostyrilyl | Other |
| isoguanisine | Other |
| N2-substituted purines | Other |
| N6-methyl-2-amino-purine | Other |
| N6-substituted purines | Other |
| N-alkylated derivative | Other |
| napthalenyl | Other |
| nitrobenzimidazolyl | Other |
| nitroimidazolyl | Other |
| nitroindazolyl | Other |
| nitropyrazolyl | Other |
| nubularine | Other |
| O6-substituted purines | Other |
| O-alkylated derivative | Other |
| ortho-(aminoalkylhydroxy)-6-phenyl-pyrrolo-pyrimidin-2-on-3-yl | Other |
| ortho-substituted-6-phenyl-pyrrolo-pyrimidin-2-on-3-yl | Other |
| Oxoformycin TP | Other |
| para-(aminoalkylhydroxy)-6-phenyl-pyrrolo-pyrimidin-2-on-3-yl | Other |
| para-substituted-6-phenyl-pyrrolo-pyrimidin-2-on-3-yl | Other |
| pentacenyl | Other |
| phenanthracenyl | Other |
| phenyl | Other |
| propynyl-7-(aza)indolyl | Other |
| pyrenyl | Other |
| pyridopyrimidin-3-yl | Other |
| pyridopyrimidin-3-yl, 2-oxo-7-amino-pyridopyrimidin-3-yl | Other |
| pyrrolo-pyrimidin-2-on-3-yl | Other |
| pyrrolopyrimidinyl | Other |
| pyrrolopyrizinyl | Other |
| stilbenzyl | Other |
| substituted 1,2,4-triazoles | Other |
| tetracenyl | Other |
| tubercidine | Other |
| xanthine | Other |
| Xanthosine-5′-TP | Other |
| 2-thio-zebularine | Other |
| 5-aza-2-thio-zebularine | Other |
| 7-deaza-2-amino-purine | Other |
| pyridin-4-one ribonucleoside | Other |
| 2-Amino-riboside-TP | Other |
| Formycin A TP | Other |
| Formycin B TP | Other |
| Pyrrolosine TP | Other |
| 2′-OH-ara-adenosine TP | Other |
| 2′-OH-ara-cytidine TP | Other |
| 2′-OH-ara-uridine TP | Other |
| 2′-OH-ara-guanosine TP | Other |
| 5-(2-carbomethoxyvinyl)uridine TP | Other |
| N6-(19-Amino-pentaoxanonadecyl)adenosine TP | Other |

[0323] The polynucleotides can include any useful linker between the nucleosides. Such linkers, including backbone modifications are given in Table 7.

TABLE 7
Linker modifications

| Name | TYPE |
|---|---|
| 3′-alkylene phosphonates | Linker |
| 3′-amino phosphoramidate | Linker |
| alkene containing backbones | Linker |
| aminoalkylphosphoramidates | Linker |
| aminoalkylphosphotriesters | Linker |
| boranophosphates | Linker |
| —CH2-0-N(CH3)—CH2— | Linker |
| —CH2—N(CH3)—N(CH3)—CH2— | Linker |
| —CH2—NH—CH2— | Linker |
| chiral phosphonates | Linker |
| chiral phosphorothioates | Linker |
| formacetyl and thioformacetyl backbones | Linker |
| methylene (methylimino) | Linker |
| methylene formacetyl and thioformacetyl backbones | Linker |
| methyleneimino and methylenehydrazino backbones | Linker |
| morpholino linkages | Linker |
| —N(CH3)—CH2—CH2— | Linker |
| oligonucleosides with heteroatom internucleoside linkage | Linker |
| phosphinates | Linker |
| phosphoramidates | Linker |
| phosphorodithioates | Linker |
| phosphorothioate internucleoside linkages | Linker |
| phosphorothioates | Linker |
| phosphotriesters | Linker |
| PNA | Linker |
| siloxane backbones | Linker |
| sulfamate backbones | Linker |
| sulfide sulfoxide and sulfone backbones | Linker |
| sulfonate and sulfonamide backbones | Linker |
| thionoalkylphosphonates | Linker |
| thionoalkylphosphotriesters | Linker |
| thionophosphoramidates | Linker |

[0324] The polynucleotides can include any useful modification, such as to the sugar, the nucleobase, or the internucleoside linkage (e.g. to a linking phosphate/to a phosphodiester linkage/to the phosphodiester backbone). One or more atoms of a pyrimidine nucleobase may be replaced or substituted with optionally substituted amino, optionally substituted thiol, optionally substituted alkyl (e.g., methyl or ethyl), or halo (e.g., chloro or fluoro). In certain embodiments, modifications (e.g., one or more modifications) are present in each of the sugar and the internucleoside linkage. Modifications according to the present invention may be modifications of ribonucleic acids (RNAs) to deoxyribonucleic acids (DNAs), threose nucleic acids (TNAs), glycol nucleic acids (GNAs), peptide nucleic acids (PNAs), locked nucleic acids (LNAs) or hybrids thereof). Additional modifications are described herein.

[0325] In some embodiments, the polynucleotides of the invention do not substantially induce an innate immune response of a cell into which the mRNA is introduced. Features of an induced innate immune response include 1) increased expression of pro-inflammatory cytokines, 2) activation of intracellular PRRs (RIG-I, MDA5, etc., and/or 3) termination or reduction in protein translation.

[0326] In certain embodiments, it may desirable to intracellularly degrade a polynucleotide introduced into the cell. For example, degradation of a polynucleotide may be preferable if precise timing of protein production is desired. Thus, in some embodiments, the invention provides a polynucleotide containing a degradation domain, which is capable of being acted on in a directed manner within a cell.

[0327] Any of the regions of the polynucleotides may be chemically modified as taught herein or as taught in International Publication Number WO2013052523 (Attorney Docket Number M9) and International Publication Number WO2014093924 (Attorney Docket Number M36) the contents of each of which are incorporated herein by reference in its entirety.

### Modified Polynucleotide Molecules

[0328] The present invention also includes building blocks, e.g., modified ribonucleotides, and modified ribonucleotides, of polynucleotide molecules. For example, these building blocks can be useful for preparing the polynucleotides of the invention. Such building blocks are taught in International Publication Number WO2013052523 (Attorney Docket Number M9) and International Publication Number WO2014093924 (Attorney Docket Number M36) the contents of each of which are incorporated herein by reference in its entirety.

### Modifications on the Sugar

[0329] The modified nucleosides and nucleotides (e.g., building block molecules), which may be incorporated into a polynucleotide (e.g., RNA or mRNA, as described herein), can be modified on the sugar of the ribonucleic acid. For example, the 2′ hydroxyl group (OH) can be modified or replaced with a number of different substituents. Exemplary substitutions at the 2′-position include, but are not limited to, H, halo, optionally substituted C₁₋₆ alkyl; optionally substituted C₁₋₆ alkoxy; optionally substituted C₆₋₁₀ aryloxy; optionally substituted C₃₋₈ cycloalkyl; optionally substituted C₃₋₈ cycloalkoxy; optionally substituted C₆₋₁₀ aryloxy; optionally substituted C₆₋₁₀ aryl-C₁₋₆ alkoxy, optionally substituted C₁₋₁₂ (heterocyclyl)oxy; a sugar (e.g., ribose, pentose, or any described herein); a polyethyleneglycol (PEG), —O(CH₂CH₂O)ₙCH₂CH₂OR, where R is H or optionally substituted alkyl, and n is an integer from 0 to 20 (e.g., from 0 to 4, from 0 to 8, from 0 to 10, from 0 to 16, from 1 to 4, from 1 to 8, from 1 to 10, from 1 to 16, from 1 to 20, from 2 to 4, from 2 to 8, from 2 to 10, from 2 to 16, from 2 to 20, from 4 to 8, from 4 to 10, from 4 to 16, and from 4 to 20); “locked” nucleic acids (LNA) in which the 2′-hydroxyl is connected by a C₁₋₆ alkylene or C₁₋₆ heteroalkylene bridge to the 4′-carbon of the same ribose sugar, where exemplary bridges included methylene, propylene, ether, or amino bridges; aminoalkyl, as defined herein; aminoalkoxy, as defined herein; amino as defined herein; and amino acid, as defined herein

[0330] Generally, RNA includes the sugar group ribose, which is a 5-membered ring having an oxygen. Exemplary, non-limiting modified nucleotides include replacement of the oxygen in ribose (e.g., with S, Se, or alkylene, such as methylene or ethylene); addition of a double bond (e.g., to replace ribose with cyclopentenyl or cyclohexenyl); ring contraction of ribose (e.g., to form a 4-membered ring of cyclobutane or oxetane); ring expansion of ribose (e.g., to form a 6- or 7-membered ring having an additional carbon or heteroatom, such as for anhydrohexitol, altritol, mannitol, cyclohexanyl, cyclohexenyl, and morpholino that also has a phosphoramidate backbone); multicyclic forms (e.g., tricyclo; and “unlocked” forms, such as glycol nucleic acid (GNA) (e.g., R-GNA or S-GNA, where ribose is replaced by glycol units attached to phosphodiester bonds), threose nucleic acid (TNA, where ribose is replace with α-L-threofuranosyl-(3′→2′)), and peptide nucleic acid (PNA, where 2-amino-ethyl-glycine linkages replace the ribose and phosphodiester backbone). The sugar group can also contain one or more carbons that possess the opposite stereochemical configuration than that of the corresponding carbon in ribose. Thus, a polynucleotide molecule can include nucleotides containing, e.g., arabinose, as the sugar. Such sugar modifications are taught International Publication No. WO2013052523 (Attorney Docket Number M9) and International Publication No. WO2014093924 (Attorney Docket Number M36) the contents of each of which are incorporated herein by reference in its entirety.

### Modifications on the Nucleobase

[0331] The present disclosure provides for modified nucleosides and nucleotides. As described herein “nucleoside” is defined as a compound containing a sugar molecule (e.g., a pentose or ribose) or a derivative thereof in combination with an organic base (e.g., a purine or pyrimidine) or a derivative thereof (also referred to herein as “nucleobase”). As described herein, “nucleotide” is defined as a nucleoside including a phosphate group. The modified nucleotides may by synthesized by any useful method, as described herein (e.g., chemically, enzymatically, or recombinantly to include one or more modified or non-natural nucleosides). The polynucleotides may comprise a region or regions of linked nucleosides. Such regions may have variable backbone linkages. The linkages may be standard phosphoester linkages, in which case the polynucleotides would comprise regions of nucleotides.

[0332] The modified nucleotide base pairing encompasses not only the standard adenosine-thymine, adenosine-uracil, or guanosine-cytosine base pairs, but also base pairs formed between nucleotides and/or modified nucleotides comprising non-standard or modified bases, wherein the arrangement of hydrogen bond donors and hydrogen bond acceptors permits hydrogen bonding between a non-standard base and a standard base or between two complementary non-standard base structures. One example of such non-standard base pairing is the base pairing between the modified nucleotide inosine and adenine, cytosine or uracil.

[0333] The modified nucleosides and nucleotides can include a modified nucleobase. Examples of nucleobases found in RNA include, but are not limited to, adenine, guanine, cytosine, and uracil. Examples of nucleobase found in DNA include, but are not limited to, adenine, guanine, cytosine, and thymine. Such modified nucleobases (including the distinctions between naturally occurring and non-naturally occurring) are taught in International Publication No. WO2013052523 (Attorney Docket Number M9) and International Publication No. WO2014093924 (Attorney Docket Number M36) the contents of each of which are incorporated herein by reference in its entirety.

### Combinations of Modified Sugars, Nucleobases, and Internucleoside Linkages

[0334] The polynucleotides of the invention can include a combination of modifications to the sugar, the nucleobase, and/or the internucleoside linkage. These combinations can include any one or more modifications described herein.

[0335] Examples of modified nucleotides and modified nucleotide combinations are provided below in Tables 8 and 9. These combinations of modified nucleotides can be used to form the polynucleotides of the invention. Unless otherwise noted, the modified nucleotides may be completely substituted for the natural nucleotides of the polynucleotides of the invention. As a non-limiting example, the natural nucleotide uridine may be substituted with a modified nucleoside described herein. In another non-limiting example, the natural nucleotide uridine may be partially substituted (e.g., about 0.1%, 1%, 5%, 10%, 15%, 20%, 25%, 30%, 35%, 40%, 45%, 50%, 55%, 60%, 65%, 70%, 75%, 80%, 85%, 90%, 95% or 99.9%) with at least one of the modified nucleoside disclosed herein. Any combination of base/sugar or linker may be incorporated into the polynucleotides of the invention and such modifications are taught in International Publication Number WO2013052523 (Attorney Docket Number M9) and in International Publication Number WO2014093924 (Attorney Docket Number M36) the contents of each of which are incorporated herein by reference in its entirety.

TABLE 8
Combinations

| Modified Nucleotide | Modified Nucleotide Combination |
|---|---|
| α-thio-cytidine | α-thio-cytidine/5-iodo-uridine |
| | α-thio-cytidine/N1-methyl-pseudouridine |
| | α-thio-cytidine/α-thio-uridine |
| | α-thio-cytidine/5-methyl-uridine |
| | α-thio-cytidine/pseudo-uridine |
| | about 50% of the cytosines are α-thio-cytidine |
| pseudoisocytidine | pseudoisocytidine/5-iodo-uridine |
| | pseudoisocytidine/N1-methyl-pseudouridine |
| | pseudoisocytidine/α-thio-uridine |
| | pseudoisocytidine/5-methyl-uridine |
| | pseudoisocytidine/pseudouridine |
| | about 25% of cytosines are pseudoisocytidine |
| | pseudoisocytidine/about 50% of uridines are N1- |
| | methyl-pseudouridine and about 50% of uridines are |
| | pseudouridine |
| | pseudoisocytidine/about 25% of uridines are N1- |
| | methyl-pseudouridine and about 25% of uridines are |
| | pseudouridine |
| pyrrolo-cytidine | pyrrolo-cytidine/5-iodo-uridine |
| | pyrrolo-cytidine/N1-methyl-pseudouridine |
| | pyrrolo-cytidine/α-thio-uridine |
| | pyrrolo-cytidine/5-methyl-uridine |
| | pyrrolo-cytidine/pseudouridine |
| | about 50% of the cytosines are pyrrolo-cytidine |
| 5-methyl-cytidine | 5-methyl-cytidine/5-iodo-uridine |
| | 5-methyl-cytidine/N1-methyl-pseudouridine |
| | 5-methyl-cytidine/α-thio-uridine |
| | 5-methyl-cytidine/5-methyl-uridine |
| | 5-methyl-cytidine/pseudouridine |
| | about 25% of cytosines are 5-methyl-cytidine |
| | about 50% of cytosines are 5-methyl-cytidine |
| | 5-methyl-cytidine/5-methoxy-uridine |
| | 5-methyl-cytidine/5-bromo-uridine |
| | 5-methyl-cytidine/2-thio-uridine |
| | 5-methyl-cytidine/about 50% of uridines are 2-thio- |
| | uridine |
| | about 50% of uridines are 5-methyl-cytidine/about |
| | 50% of uridines are 2-thio-uridine |
| N4-acetyl-cytidine | N4-acetyl-cytidine/5-iodo-uridine |
| | N4-acetyl-cytidine/N1-methyl-pseudouridine |
| | N4-acetyl-cytidine/α-thio-uridine |
| | N4-acetyl-cytidine/5-methyl-uridine |
| | N4-acetyl-cytidine/pseudouridine |
| | about 50% of cytosines are N4-acetyl-cytidine |
| | about 25% of cytosines are N4-acetyl-cytidine |
| | N4-acetyl-cytidine/5-methoxy-uridine |
| | N4-acetyl-cytidine/5-bromo-uridine |
| | N4-acetyl-cytidine/2-thio-uridine |
| | about 50% of cytosines are N4-acetyl-cytidine/about |
| | 50% of uridines are 2-thio-uridine |

TABLE 9
Combinations

1-(2,2,2-Trifluoroethyl)pseudo-UTP
1-Ethyl-pseudo-UTP
1-Methyl-pseudo-U-alpha-thio-TP
1-methyl-pseudouridine TP, ATP, GTP, CTP
1-methyl-pseudo-UTP/5-methyl-CTP/ATP/GTP
1-methyl-pseudo-UTP/CTP/ATP/GTP
1-Propyl-pseudo-UTP
25% 5-Aminoallyl-CTP + 75% CTP/25% 5-Methoxy-UTP + 75% UTP
25% 5-Aminoallyl-CTP + 75% CTP/75% 5-Methoxy-UTP + 25% UTP
25% 5-Bromo-CTP + 75% CTP/25% 5-Methoxy-UTP + 75% UTP
25% 5-Bromo-CTP + 75% CTP/75% 5-Methoxy-UTP + 25% UTP
25% 5-Bromo-CTP + 75% CTP/1-Methyl-pseudo-UTP
25% 5-Carboxy-CTP + 75% CTP/25% 5-Methoxy-UTP + 75% UTP
25% 5-Carboxy-CTP + 75% CTP/75% 5-Methoxy-UTP + 25% UTP
25% 5-Ethyl-CTP + 75% CTP/25% 5-Methoxy-UTP + 75% UTP
25% 5-Ethyl-CTP + 75% CTP/75% 5-Methoxy-UTP + 25% UTP
25% 5-Ethynyl-CTP + 75% CTP/25% 5-Methoxy-UTP + 75% UTP
25% 5-Ethynyl-CTP + 75% CTP/75% 5-Methoxy-UTP + 25% UTP
25% 5-Fluoro-CTP + 75% CTP/25% 5-Methoxy-UTP + 75% UTP
25% 5-Fluoro-CTP + 75% CTP/75% 5-Methoxy-UTP + 25% UTP
25% 5-Formyl-CTP + 75% CTP/25% 5-Methoxy-UTP + 75% UTP
25% 5-Formyl-CTP + 75% CTP/75% 5-Methoxy-UTP + 25% UTP
25% 5-Hydroxymethyl-CTP + 75% CTP/25% 5-Methoxy-UTP + 75% UTP
25% 5-Hydroxymethyl-CTP + 75% CTP/75% 5-Methoxy-UTP + 25% UTP
25% 5-Iodo-CTP + 75% CTP/25% 5-Methoxy-UTP + 75% UTP
25% 5-Iodo-CTP + 75% CTP/75% 5-Methoxy-UTP + 25% UTP
25% 5-Methoxy-CTP + 75% CTP/25% 5-Methoxy-UTP + 75% UTP
25% 5-Methoxy-CTP + 75% CTP/75% 5-Methoxy-UTP + 25% UTP
25% 5-Methyl-CTP + 75% CTP/25% 5-Methoxy-UTP + 75% 1-Methyl-pseudo-UTP
25% 5-Methyl-CTP + 75% CTP/25% 5-Methoxy-UTP + 75% UTP
25% 5-Methyl-CTP + 75% CTP/50% 5-Methoxy-UTP + 50% 1-Methyl-pseudo-UTP
25% 5-Methyl-CTP + 75% CTP/50% 5-Methoxy-UTP + 50% UTP
25% 5-Methyl-CTP + 75% CTP/5-Methoxy-UTP
25% 5-Methyl-CTP + 75% CTP/75% 5-Methoxy-UTP + 25% 1-Methyl-pseudo-UTP
25% 5-Methyl-CTP + 75% CTP/75% 5-Methoxy-UTP + 25% UTP
25% 5-Phenyl-CTP + 75% CTP/25% 5-Methoxy-UTP + 75% UTP
25% 5-Phenyl-CTP + 75% CTP/75% 5-Methoxy-UTP + 25% UTP
25% 5-Trifluoromethyl-CTP + 75% CTP/25% 5-Methoxy-UTP + 75% UTP
25% 5-Trifluoromethyl-CTP + 75% CTP/75% 5-Methoxy-UTP + 25% UTP
25% 5-Trifluoromethyl-CTP + 75% CTP/1-Methyl-pseudo-UTP
25% N4-Ac-CTP + 75% CTP/25% 5-Methoxy-UTP + 75% UTP
25% N4-Ac-CTP + 75% CTP/75% 5-Methoxy-UTP + 25% UTP
25% N4-Bz-CTP + 75% CTP/25% 5-Methoxy-UTP + 75% UTP
25% N4-Bz-CTP + 75% CTP/75% 5-Methoxy-UTP + 25% UTP
25% N4-Methyl-CTP + 75% CTP/25% 5-Methoxy-UTP + 75% UTP
25% N4-Methyl-CTP + 75% CTP/75% 5-Methoxy-UTP + 25% UTP
25% Pseudo-iso-CTP + 75% CTP/25% 5-Methoxy-UTP + 75% UTP
25% Pseudo-iso-CTP + 75% CTP/75% 5-Methoxy-UTP + 25% UTP
25% 5-Bromo-CTP/75% CTP/Pseudo-UTP
25% 5-methoxy-UTP/25% 5-methyl-CTP/ATP/GTP
25% 5-methoxy-UTP/5-methyl-CTP/ATP/GTP
25% 5-methoxy-UTP/75% 5-methyl-CTP/ATP/GTP
25% 5-methoxy-UTP/CTP/ATP/GTP
25% 5-metoxy-UTP/50% 5-methyl-CTP/ATP/GTP
2-Amino-ATP
2-Thio-CTP
2-thio-pseudouridine TP, ATP, GTP, CTP
2-Thio-pseudo-UTP
2-Thio-UTP
3-Methyl-CTP
3-Methyl-pseudo-UTP
4-Thio-UTP
50% 5-Bromo-CTP + 50% CTP/1-Methyl-pseudo-UTP
50% 5-Hydroxymethyl-CTP + 50% CTP/1-Methyl-pseudo-UTP
50% 5-methoxy-UTP/5-methyl-CTP/ATP/GTP
50% 5-Methyl-CTP + 50% CTP/25% 5-Methoxy-UTP + 75% 1-Methyl-pseudo-UTP
50% 5-Methyl-CTP + 50% CTP/25% 5-Methoxy-UTP + 75% UTP
50% 5-Methyl-CTP + 50% CTP/50% 5-Methoxy-UTP + 50% 1-Methyl-pseudo-UTP
50% 5-Methyl-CTP + 50% CTP/50% 5-Methoxy-UTP + 50% UTP
50% 5-Methyl-CTP + 50% CTP/5-Methoxy-UTP
50% 5-Methyl-CTP + 50% CTP/75% 5-Methoxy-UTP + 25% 1-Methyl-pseudo-UTP
50% 5-Methyl-CTP + 50% CTP/75% 5-Methoxy-UTP + 25% UTP
50% 5-Trifluoromethyl-CTP + 50% CTP/1-Methyl-pseudo-UTP
50% 5-Bromo-CTP/50% CTP/Pseudo-UTP
50% 5-methoxy-UTP/25% 5-methyl-CTP/ATP/GTP
50% 5-methoxy-UTP/50% 5-methyl-CTP/ATP/GTP
50% 5-methoxy-UTP/75% 5-methyl-CTP/ATP/GTP
50% 5-methoxy-UTP/CTP/ATP/GTP
5-Aminoallyl-CTP
5-Aminoallyl-CTP/5-Methoxy-UTP
5-Aminoallyl-UTP
5-Bromo-CTP
5-Bromo-CTP/5-Methoxy-UTP
5-Bromo-CTP/1-Methyl-pseudo-UTP
5-Bromo-CTP/Pseudo-UTP
5-bromocytidine TP, ATP, GTP, UTP
5-Bromo-UTP
5-Carboxy-CTP/5-Methoxy-UTP
5-Ethyl-CTP/5-Methoxy-UTP
5-Ethynyl-CTP/5-Methoxy-UTP
5-Fluoro-CTP/5-Methoxy-UTP
5-Formyl-CTP/5-Methoxy-UTP
5-Hydroxy-methyl-CTP/5-Methoxy-UTP
5-Hydroxymethyl-CTP
5-Hydroxymethyl-CTP/1-Methyl-pseudo-UTP
5-Hydroxymethyl-CTP/5-Methoxy-UTP
5-hydroxymethyl-cytidine TP, ATP, GTP, UTP
5-Iodo-CTP/5-Methoxy-UTP
5-Me-CTP/5-Methoxy-UTP
5-Methoxy carbonyl methyl-UTP
5-Methoxy-CTP/5-Methoxy-UTP
5-methoxy-uridine TP, ATP, GTP, UTP
5-methoxy-UTP
5-Methoxy-UTP
5-Methoxy-UTP/N6-Isopentenyl-ATP
5-methoxy-UTP/25% 5-methyl-CTP/ATP/GTP
5-methoxy-UTP/5-methyl-CTP/ATP/GTP
5-methoxy-UTP/75% 5-methyl-CTP/ATP/GTP
5-methoxy-UTP/CTP/ATP/GTP
5-Methyl-2-thio-UTP
5-Methylaminomethyl-UTP
5-Methyl-CTP/5-Methoxy-UTP
5-Methyl-CTP/5-Methoxy-UTP(cap 0)
5-Methyl-CTP/5-Methoxy-UTP(No cap)
5-Methyl-CTP/25% 5-Methoxy-UTP + 75% 1-Methyl-pseudo-UTP
5-Methyl-CTP/25% 5-Methoxy-UTP + 75% UTP
5-Methyl-CTP/50% 5-Methoxy-UTP + 50% 1-Methyl-pseudo-UTP
5-Methyl-CTP/50% 5-Methoxy-UTP + 50% UTP
5-Methyl-CTP/5-Methoxy-UTP/N6-Me-ATP
5-Methyl-CTP/75% 5-Methoxy-UTP + 25% 1-Methyl-pseudo-UTP
5-Methyl-CTP/75% 5-Methoxy-UTP + 25% UTP
5-Phenyl-CTP/5-Methoxy-UTP
5-Trifluoro-methyl-CTP/5-Methoxy-UTP
5-Trifluoromethyl-CTP
5-Trifluoromethyl-CTP/5-Methoxy-UTP
5-Trifluoromethyl-CTP/1-Methyl-pseudo-UTP
5-Trifluoromethyl-CTP/Pseudo-UTP
5-Trifluoromethyl-UTP
5-trifluromethylcytidine TP, ATP, GTP, UTP
75% 5-Aminoallyl-CTP + 25% CTP/25% 5-Methoxy-UTP + 75% UTP
75% 5-Aminoallyl-CTP + 25% CTP/75% 5-Methoxy-UTP + 25% UTP
75% 5-Bromo-CTP + 25% CTP/25% 5-Methoxy-UTP + 75% UTP
75% 5-Bromo-CTP + 25% CTP/75% 5-Methoxy-UTP + 25% UTP
75% 5-Carboxy-CTP + 25% CTP/25% 5-Methoxy-UTP + 75% UTP
75% 5-Carboxy-CTP + 25% CTP/75% 5-Methoxy-UTP + 25% UTP
75% 5-Ethyl-CTP + 25% CTP/25% 5-Methoxy-UTP + 75% UTP
75% 5-Ethyl-CTP + 25% CTP/75% 5-Methoxy-UTP + 25% UTP
75% 5-Ethynyl-CTP + 25% CTP/25% 5-Methoxy-UTP + 75% UTP
75% 5-Ethynyl-CTP + 25% CTP/75% 5-Methoxy-UTP + 25% UTP
75% 5-Fluoro-CTP + 25% CTP/25% 5-Methoxy-UTP + 75% UTP
75% 5-Fluoro-CTP + 25% CTP/75% 5-Methoxy-UTP + 25% UTP
75% 5-Formyl-CTP + 25% CTP/25% 5-Methoxy-UTP + 75% UTP
75% 5-Formyl-CTP + 25% CTP/75% 5-Methoxy-UTP + 25% UTP
75% 5-Hydroxymethyl-CTP + 25% CTP/25% 5-Methoxy-UTP + 75% UTP
75% 5-Hydroxymethyl-CTP + 25% CTP/75% 5-Methoxy-UTP + 25% UTP
75% 5-Iodo-CTP + 25% CTP/25% 5-Methoxy-UTP + 75% UTP
75% 5-Iodo-CTP + 25% CTP/75% 5-Methoxy-UTP + 25% UTP
75% 5-Methoxy-CTP + 25% CTP/25% 5-Methoxy-UTP + 75% UTP
75% 5-Methoxy-CTP + 25% CTP/75% 5-Methoxy-UTP + 25% UTP
75% 5-methoxy-UTP/5-methyl-CTP/ATP/GTP
75% 5-Methyl-CTP + 25% CTP/25% 5-Methoxy-UTP + 75% 1-Methyl-pseudo-UTP
75% 5-Methyl-CTP + 25% CTP/25% 5-Methoxy-UTP + 75% UTP
75% 5-Methyl-CTP + 25% CTP/50% 5-Methoxy-UTP + 50% 1-Methyl-pseudo-UTP
75% 5-Methyl-CTP + 25% CTP/50% 5-Methoxy-UTP + 50% UTP
75% 5-Methyl-CTP + 25% CTP/5-Methoxy-UTP
75% 5-Methyl-CTP + 25% CTP/75% 5-Methoxy-UTP + 25% 1-Methyl-pseudo-UTP
75% 5-Methyl-CTP + 25% CTP/75% 5-Methoxy-UTP + 25% UTP
75% 5-Phenyl-CTP + 25% CTP/25% 5-Methoxy-UTP + 75% UTP
75% 5-Phenyl-CTP + 25% CTP/75% 5-Methoxy-UTP + 25% UTP
75% 5-Trifluoromethyl-CTP + 25% CTP/25% 5-Methoxy-UTP + 75% UTP
75% 5-Trifluoromethyl-CTP + 25% CTP/75% 5-Methoxy-UTP + 25% UTP
75% 5-Trifluoromethyl-CTP + 25% CTP/1-Methyl-pseudo-UTP
75% N4-Ac-CTP + 25% CTP/25% 5-Methoxy-UTP + 75% UTP
75% N4-Ac-CTP + 25% CTP/75% 5-Methoxy-UTP + 25% UTP
75% N4-Bz-CTP + 25% CTP/25% 5-Methoxy-UTP + 75% UTP
75% N4-Bz-CTP + 25% CTP/75% 5-Methoxy-UTP + 25% UTP
75% N4-Methyl-CTP + 25% CTP/25% 5-Methoxy-UTP + 75% UTP
75% N4-Methyl-CTP + 25% CTP/75% 5-Methoxy-UTP + 25% UTP
75% Pseudo-iso-CTP + 25% CTP/25% 5-Methoxy-UTP + 75% UTP
75% Pseudo-iso-CTP + 25% CTP/75% 5-Methoxy-UTP + 25% UTP
75% 5-Bromo-CTP/25% CTP/1-Methyl-pseudo-UTP
75% 5-Bromo-CTP/25% CTP/Pseudo-UTP
75% 5-methoxy-UTP/25% 5-methyl-CTP/ATP/GTP
75% 5-methoxy-UTP/50% 5-methyl-CTP/ATP/GTP
75% 5-methoxy-UTP/75% 5-methyl-CTP/ATP/GTP
75% 5-methoxy-UTP/CTP/ATP/GTP
8-Aza-ATP
Alpha-thio-CTP
CTP/25% 5-Methoxy-UTP + 75% 1-Methyl-pseudo-UTP
CTP/25% 5-Methoxy-UTP + 75% UTP
CTP/50% 5-Methoxy-UTP + 50% 1-Methyl-pseudo-UTP
CTP/50% 5-Methoxy-UTP + 50% UTP
CTP/5-Methoxy-UTP
CTP/5-Methoxy-UTP (cap 0)
CTP/5-Methoxy-UTP(No cap)
CTP/75% 5-Methoxy-UTP + 25% 1-Methyl-pseudo-UTP
CTP/75% 5-Methoxy-UTP + 25% UTP
CTP/UTP(No cap)
N1-Me-GTP
N4-Ac-CTP
N4Ac-CTP/1-Methyl-pseudo-UTP
N4Ac-CTP/5-Methoxy-UTP
N4-acetyl-cytidine TP, ATP, GTP, UTP
N4-Bz-CTP/5-Methoxy-UTP
N4-methyl CTP
N4-Methyl-CTP/5-Methoxy-UTP
Pseudo-iso-CTP/5-Methoxy-UTP
PseudoU-alpha-thio-TP
pseudouridine TP, ATP, GTP, CTP
pseudo-UTP/5-methyl-CTP/ATP/GTP
UTP-5-oxyacetic acid Me ester
Xanthosine

[0336] According to the invention, polynucleotides of the invention may be synthesized to comprise the combinations or single modifications of Tables 8 or 9.

[0337] Where a single modification is listed, the listed nucleoside or nucleotide represents 100 percent of that A, U, G or C nucleotide or nucleoside having been modified. Where percentages are listed, these represent the percentage of that particular A, U, G or C nucleobase triphosphate of the total amount of A, U, G, or C triphosphate present. For example, the combination: 25% 5-Aminoallyl-CTP+75% CTP/25% 5-Methoxy-UTP+75% UTP refers to a polynucleotide where 25% of the cytosine triphosphates are 5-Aminoallyl-CTP while 75% of the cytosines are CTP; whereas 25% of the uracils are 5-methoxy UTP while 75% of the uracils are UTP. Where no modified UTP is listed then the naturally occurring ATP, UTP, GTP and/or CTP is used at 100% of the sites of those nucleotides found in the polynucleotide. In this example all of the GTP and ATP nucleotides are left unmodified.

### IV. Pharmaceutical Compositions

### Formulation, Administration, Delivery and Dosing

[0338] The present invention provides polynucleotides compositions and complexes in combination with one or more pharmaceutically acceptable excipients. Pharmaceutical compositions may optionally comprise one or more additional active substances, e.g. therapeutically and/or prophylactically active substances. Pharmaceutical compositions of the present invention may be sterile and/or pyrogen-free. General considerations in the formulation and/or manufacture of pharmaceutical agents may be found, for example, in Remington: The Science and Practice of Pharmacy 21^{st} ed., Lippincott Williams & Wilkins, 2005 (incorporated herein by reference in its entirety).

[0339] In some embodiments, compositions are administered to humans, human patients or subjects. For the purposes of the present disclosure, the phrase “active ingredient” generally refers to polynucleotides to be delivered as described herein.

[0340] Although the descriptions of pharmaceutical compositions provided herein are principally directed to pharmaceutical compositions which are suitable for administration to humans, it will be understood by the skilled artisan that such compositions are generally suitable for administration to any other animal, e.g., to non-human animals, e.g. non-human mammals. Modification of pharmaceutical compositions suitable for administration to humans in order to render the compositions suitable for administration to various animals is well understood, and the ordinarily skilled veterinary pharmacologist can design and/or perform such modification with merely ordinary, if any, experimentation. Subjects to which administration of the pharmaceutical compositions is contemplated include, but are not limited to, humans and/or other primates; mammals, including commercially relevant mammals such as cattle, pigs, horses, sheep, cats, dogs, mice, and/or rats; and/or birds, including commercially relevant birds such as poultry, chickens, ducks, geese, and/or turkeys.

[0341] Formulations of the pharmaceutical compositions described herein may be prepared by any method known or hereafter developed in the art of pharmacology. In general, such preparatory methods include the step of bringing the active ingredient into association with an excipient and/or one or more other accessory ingredients, and then, if necessary and/or desirable, dividing, shaping and/or packaging the product into a desired single- or multi-dose unit.

[0342] Relative amounts of the active ingredient, the pharmaceutically acceptable excipient, and/or any additional ingredients in a pharmaceutical composition in accordance with the invention will vary, depending upon the identity, size, and/or condition of the subject treated and further depending upon the route by which the composition is to be administered. By way of example, the composition may comprise between 0.1% and 100%, e.g., between 0.5 and 50%, between 1-30%, between 5-80%, at least 80% (w/w) active ingredient.

### Formulations

[0343] The polynucleotides of the invention can be formulated using one or more excipients to: (1) increase stability; (2) increase cell transfection; (3) permit the sustained or delayed release (e.g., from a depot formulation of the polynucleotide); (4) alter the biodistribution (e.g., target the polynucleotide to specific tissues or cell types); (5) increase the translation of encoded protein in vivo; and/or (6) alter the release profile of encoded protein in vivo. In addition to traditional excipients such as any and all solvents, dispersion media, diluents, or other liquid vehicles, dispersion or suspension aids, surface active agents, isotonic agents, thickening or emulsifying agents, preservatives, excipients of the present invention can include, without limitation, lipidoids, liposomes, lipid nanoparticles, polymers, lipoplexes, core-shell nanoparticles, peptides, proteins, cells transfected with polynucleotides (e.g., for transplantation into a subject), hyaluronidase, nanoparticle mimics and combinations thereof. Accordingly, the formulations of the invention can include one or more excipients, each in an amount that together increases the stability of the polynucleotide, increases cell transfection by the polynucleotide, increases the expression of polynucleotides encoded protein, and/or alters the release profile of polynucleotide encoded proteins. Further, the polynucleotides of the present invention may be formulated using self-assembled nucleic acid nanoparticles.

[0344] Formulations of the pharmaceutical compositions described herein may be prepared by any method known or hereafter developed in the art of pharmacology. In general, such preparatory methods include the step of associating the active ingredient with an excipient and/or one or more other accessory ingredients.

[0345] A pharmaceutical composition in accordance with the present disclosure may be prepared, packaged, and/or sold in bulk, as a single unit dose, and/or as a plurality of single unit doses. As used herein, a “unit dose” refers to a discrete amount of the pharmaceutical composition comprising a predetermined amount of the active ingredient. The amount of the active ingredient is generally equal to the dosage of the active ingredient which would be administered to a subject and/or a convenient fraction of such a dosage such as, for example, one-half or one-third of such a dosage.

[0346] Relative amounts of the active ingredient, the pharmaceutically acceptable excipient, and/or any additional ingredients in a pharmaceutical composition in accordance with the present disclosure may vary, depending upon the identity, size, and/or condition of the subject being treated and further depending upon the route by which the composition is to be administered. For example, the composition may comprise between 0.1% and 99% (w/w) of the active ingredient. By way of example, the composition may comprise between 0.1% and 100%, e.g., between 0.5 and 50%, between 1-30%, between 5-80%, at least 80% (w/w) active ingredient.

[0347] In some embodiments, the formulations described herein may contain at least one polynucleotide. As a non-limiting example, the formulations may contain 1, 2, 3, 4 or 5 polynucleotide.

[0348] In one embodiment, the formulations described herein may comprise more than one type of polynucleotide. In one embodiment, the formulation may comprise a chimeric polynucleotide in linear and circular form. In another embodiment, the formulation may comprise a circular polynucleotide and an IVT polynucleotide. In yet another embodiment, the formulation may comprise an IVT polynucleotide, a chimeric polynucleotide and a circular polynucleotide.

[0349] In one embodiment the formulation may contain polynucleotide encoding proteins selected from categories such as, but not limited to, human proteins, veterinary proteins, bacterial proteins, biological proteins, antibodies, immunogenic proteins, therapeutic peptides and proteins, secreted proteins, plasma membrane proteins, cytoplasmic and cytoskeletal proteins, intracellular membrane bound proteins, nuclear proteins, proteins associated with human disease and/or proteins associated with non-human diseases. In one embodiment, the formulation contains at least three polynucleotides encoding proteins. In one embodiment, the formulation contains at least five polynucleotide encoding proteins.

[0350] Pharmaceutical formulations may additionally comprise a pharmaceutically acceptable excipient, which, as used herein, includes, but is not limited to, any and all solvents, dispersion media, diluents, or other liquid vehicles, dispersion or suspension aids, surface active agents, isotonic agents, thickening or emulsifying agents, preservatives, and the like, as suited to the particular dosage form desired. Various excipients for formulating pharmaceutical compositions and techniques for preparing the composition are known in the art (see Remington: The Science and Practice of Pharmacy, 21^{st} Edition, A. R. Gennaro, Lippincott, Williams & Wilkins, Baltimore, Md., 2006; incorporated herein by reference in its entirety). The use of a conventional excipient medium may be contemplated within the scope of the present disclosure, except insofar as any conventional excipient medium may be incompatible with a substance or its derivatives, such as by producing any undesirable biological effect or otherwise interacting in a deleterious manner with any other component(s) of the pharmaceutical composition.

[0351] In some embodiments, the particle size of the lipid nanoparticle may be increased and/or decreased. The change in particle size may be able to help counter biological reaction such as, but not limited to, inflammation or may increase the biological effect of the modified mRNA delivered to mammals.

[0352] Pharmaceutically acceptable excipients used in the manufacture of pharmaceutical compositions include, but are not limited to, inert diluents, surface active agents and/or emulsifiers, preservatives, buffering agents, lubricating agents, and/or oils. Such excipients may optionally be included in the pharmaceutical formulations of the invention.

### Lipidoids

[0353] The synthesis of lipidoids has been extensively described and formulations containing these compounds are particularly suited for delivery of polynucleotides (see Mahon et al., Bioconjug Chem. 2010 21:1448-1454; Schroeder et al., J Intern Med. 2010 267:9-21; Akinc et al., Nat Biotechnol. 2008 26:561-569; Love et al., Proc Natl Acad Sci USA. 2010 107:1864-1869; Siegwart et al., Proc Natl Acad Sci USA. 2011 108:12996-3001; all of which are incorporated herein in their entireties).

[0354] While these lipidoids have been used to effectively deliver double stranded small interfering RNA molecules in rodents and non-human primates (see Akinc et al., Nat Biotechnol. 2008 26:561-569; Frank-Kamenetsky et al., Proc Natl Acad Sci USA. 2008 105:11915-11920; Akinc et al., Mol Ther. 2009 17:872-879; Love et al., Proc Natl Acad Sci USA. 2010 107:1864-1869; Leuschner et al., Nat Biotechnol. 2011 29:1005-1010; all of which is incorporated herein in their entirety), the present disclosure describes their formulation and use in delivering polynucleotides.

[0355] Complexes, micelles, liposomes or particles can be prepared containing these lipidoids and therefore, can result in an effective delivery of the polynucleotide, as judged by the production of an encoded protein, following the injection of a lipidoid formulation via localized and/or systemic routes of administration. Lipidoid complexes of polynucleotides can be administered by various means including, but not limited to, intravenous, intramuscular, or subcutaneous routes.

[0356] In vivo delivery of nucleic acids may be affected by many parameters, including, but not limited to, the formulation composition, nature of particle PEGylation, degree of loading, polynucleotide to lipid ratio, and biophysical parameters such as, but not limited to, particle size (Akinc et al., Mol Ther. 2009 17:872-879; herein incorporated by reference in its entirety). As an example, small changes in the anchor chain length of poly(ethylene glycol) (PEG) lipids may result in significant effects on in vivo efficacy. Formulations with the different lipidoids, including, but not limited to penta[3-(1-laurylaminopropionyl)]-triethylenetetramine hydrochloride (TETA-5LAP; aka 98N12-5, see Murugaiah et al., Analytical Biochemistry, 401:61 (2010); herein incorporated by reference in its entirety), C12-200 (including derivatives and variants), and MD1, can be tested for in vivo activity.

[0357] The lipidoid referred to herein as “98N12-5” is disclosed by Akinc et al., Mol Ther. 2009 17:872-879 and is incorporated by reference in its entirety.

[0358] The lipidoid referred to herein as “C12-200” is disclosed by Love et al., Proc Natl Acad Sci USA. 2010 107:1864-1869 and Liu and Huang, Molecular Therapy. 2010 669-670; both of which are herein incorporated by reference in their entirety. The lipidoid formulations can include particles comprising either 3 or 4 or more components in addition to polynucleotides. As an example, formulations with certain lipidoids, include, but are not limited to, 98N12-5 and may contain 42% lipidoid, 48% cholesterol and 10% PEG (C14 alkyl chain length). As another example, formulations with certain lipidoids, include, but are not limited to, C12-200 and may contain 50% lipidoid, 10% disteroylphosphatidyl choline, 38.5% cholesterol, and 1.5% PEG-DMG.

[0359] In one embodiment, a polynucleotide formulated with a lipidoid for systemic intravenous administration can target the liver. For example, a final optimized intravenous formulation using polynucleotides, and comprising a lipid molar composition of 42% 98N12-5, 48% cholesterol, and 10% PEG-lipid with a final weight ratio of about 7.5 to 1 total lipid to polynucleotides, and a C14 alkyl chain length on the PEG lipid, with a mean particle size of roughly 50-60 nm, can result in the distribution of the formulation to be greater than 90% to the liver. (see, Akinc et al., Mol Ther. 2009 17:872-879; herein incorporated by reference in its entirety). In another example, an intravenous formulation using a C12-200 (see U.S. provisional application 61/175,770 and published international application WO2010129709, each of which is herein incorporated by reference in their entirety) lipidoid may have a molar ratio of 50/10/38.5/1.5 of C12-200/disteroylphosphatidyl choline/cholesterol/PEG-DMG, with a weight ratio of 7 to 1 total lipid to polynucleotides, and a mean particle size of 80 nm may be effective to deliver polynucleotides to hepatocytes (see, Love et al., Proc Natl Acad Sci USA. 2010 107:1864-1869 herein incorporated by reference in its entirety). In another embodiment, an MD1 lipidoid-containing formulation may be used to effectively deliver polynucleotides to hepatocytes in vivo.

[0360] The characteristics of optimized lipidoid formulations for intramuscular or subcutaneous routes may vary significantly depending on the target cell type and the ability of formulations to diffuse through the extracellular matrix into the blood stream. While a particle size of less than 150 nm may be desired for effective hepatocyte delivery due to the size of the endothelial fenestrae (see, Akinc et al., Mol Ther. 2009 17:872-879 herein incorporated by reference in its entirety), use of a lipidoid-formulated polynucleotides to deliver the formulation to other cells types including, but not limited to, endothelial cells, myeloid cells, and muscle cells may not be similarly size-limited.

[0361] Use of lipidoid formulations to deliver siRNA in vivo to other non-hepatocyte cells such as myeloid cells and endothelium has been reported (see Akinc et al., Nat Biotechnol. 2008 26:561-569; Leuschner et al., Nat Biotechnol. 2011 29:1005-1010; Cho et al. Adv. Funct. Mater. 2009 19:3112-3118; 8^{th} International Judah Folkman Conference, Cambridge, Mass. Oct. 8-9, 2010; each of which is herein incorporated by reference in its entirety). Effective delivery to myeloid cells, such as monocytes, lipidoid formulations may have a similar component molar ratio. Different ratios of lipidoids and other components including, but not limited to, disteroylphosphatidyl choline, cholesterol and PEG-DMG, may be used to optimize the formulation of the polynucleotide for delivery to different cell types including, but not limited to, hepatocytes, myeloid cells, muscle cells, etc. For example, the component molar ratio may include, but is not limited to, 50% C12-200, 10% disteroylphosphatidyl choline, 38.5% cholesterol, and %1.5 PEG-DMG (see Leuschner et al., Nat Biotechnol 2011 29:1005-1010; herein incorporated by reference in its entirety). The use of lipidoid formulations for the localized delivery of nucleic acids to cells (such as, but not limited to, adipose cells and muscle cells) via either subcutaneous or intramuscular delivery, may not require all of the formulation components desired for systemic delivery, and as such may comprise only the lipidoid and the polynucleotide.

[0362] Combinations of different lipidoids may be used to improve the efficacy of polynucleotides directed protein production as the lipidoids may be able to increase cell transfection by the polynucleotide; and/or increase the translation of encoded protein (see Whitehead et al., Mol. Ther. 2011, 19:1688-1694, herein incorporated by reference in its entirety).

### Liposomes, Lipoplexes, and Lipid Nanoparticles

[0363] The polynucleotides of the invention can be formulated using one or more liposomes, lipoplexes, or lipid nanoparticles. In one embodiment, pharmaceutical compositions of polynucleotides include liposomes. Liposomes are artificially-prepared vesicles which may primarily be composed of a lipid bilayer and may be used as a delivery vehicle for the administration of nutrients and pharmaceutical formulations. Liposomes can be of different sizes such as, but not limited to, a multilamellar vesicle (MLV) which may be hundreds of nanometers in diameter and may contain a series of concentric bilayers separated by narrow aqueous compartments, a small unicellular vesicle (SUV) which may be smaller than 50 nm in diameter, and a large unilamellar vesicle (LUV) which may be between 50 and 500 nm in diameter. Liposome design may include, but is not limited to, opsonins or ligands in order to improve the attachment of liposomes to unhealthy tissue or to activate events such as, but not limited to, endocytosis. Liposomes may contain a low or a high pH in order to improve the delivery of the pharmaceutical formulations.

[0364] The formation of liposomes may depend on the physicochemical characteristics such as, but not limited to, the pharmaceutical formulation entrapped and the liposomal ingredients, the nature of the medium in which the lipid vesicles are dispersed, the effective concentration of the entrapped substance and its potential toxicity, any additional processes involved during the application and/or delivery of the vesicles, the optimization size, polydispersity and the shelf-life of the vesicles for the intended application, and the batch-to-batch reproducibility and possibility of large-scale production of safe and efficient liposomal products.

[0365] As a non-limiting example, liposomes such as synthetic membrane vesicles may be prepared by the methods, apparatus and devices described in US Patent Publication No. US20130177638, US20130177637, US20130177636, US20130177635, US20130177634, US20130177633, US20130183375, US20130183373 and US20130183372, the contents of each of which are herein incorporated by reference in its entirety.

[0366] In one embodiment, pharmaceutical compositions described herein may include, without limitation, liposomes such as those formed from 1,2-dioleyloxy-N,N-dimethylaminopropane (DODMA) liposomes, DiLa2 liposomes from Marina Biotech (Bothell, Wash.), 1,2-dilinoleyloxy-3-dimethylaminopropane (DLin-DMA), 2,2-dilinoleyl-4-(2-dimethylaminoethyl)-[1,3]-dioxolane (DLin-KC2-DMA), and MC3 (US20100324120; herein incorporated by reference in its entirety) and liposomes which may deliver small molecule drugs such as, but not limited to, DOXIL® from Janssen Biotech, Inc. (Horsham, Pa.).

[0367] In one embodiment, pharmaceutical compositions described herein may include, without limitation, liposomes such as those formed from the synthesis of stabilized plasmid-lipid particles (SPLP) or stabilized nucleic acid lipid particle (SNALP) that have been previously described and shown to be suitable for oligonucleotide delivery in vitro and in vivo (see Wheeler et al. Gene Therapy. 1999 6:271-281; Zhang et al. Gene Therapy. 1999 6:1438-1447; Jeffs et al. Pharm Res. 2005 22:362-372; Morrissey et al., Nat Biotechnol. 2005 2:1002-1007; Zimmermann et al., Nature. 2006 441:111-114; Heyes et al. J Contr Rel. 2005 107:276-287; Semple et al. Nature Biotech. 2010 28:172-176; Judge et al. J Clin Invest. 2009 119:661-673; deFougerolles Hum Gene Ther. 2008 19:125-132; U.S. Patent Publication No US20130122104; all of which are incorporated herein in their entireties). The original manufacture method by Wheeler et al. was a detergent dialysis method, which was later improved by Jeffs et al. and is referred to as the spontaneous vesicle formation method. The liposome formulations are composed of 3 to 4 lipid components in addition to the polynucleotide. As an example a liposome can contain, but is not limited to, 55% cholesterol, 20% disteroylphosphatidyl choline (DSPC), 10% PEG-S-DSG, and 15% 1,2-dioleyloxy-N,N-dimethylaminopropane (DODMA), as described by Jeffs et al. As another example, certain liposome formulations may contain, but are not limited to, 48% cholesterol, 20% DSPC, 2% PEG-c-DMA, and 30% cationic lipid, where the cationic lipid can be 1,2-distearloxy-N,N-dimethylaminopropane (DSDMA), DODMA, DLin-DMA, or 1,2-dilinolenyloxy-3-dimethylaminopropane (DLenDMA), as described by Heyes et al.

[0368] In some embodiments, liposome formulations may comprise from about 25.0% cholesterol to about 40.0% cholesterol, from about 30.0% cholesterol to about 45.0% cholesterol, from about 35.0% cholesterol to about 50.0% cholesterol and/or from about 48.5% cholesterol to about 60% cholesterol. In a preferred embodiment, formulations may comprise a percentage of cholesterol selected from the group consisting of 28.5%, 31.5%, 33.5%, 36.5%, 37.0%, 38.5%, 39.0% and 43.5%. In some embodiments, formulations may comprise from about 5.0% to about 10.0% DSPC and/or from about 7.0% to about 15.0% DSPC.

[0369] In one embodiment, pharmaceutical compositions may include liposomes which may be formed to deliver polynucleotides which may encode at least one immunogen or any other polypeptide of interest. The polynucleotide may be encapsulated by the liposome and/or it may be contained in an aqueous core which may then be encapsulated by the liposome (see International Pub. Nos. WO2012031046, WO2012031043, WO2012030901 and WO2012006378 and US Patent Publication No. US20130189351, US20130195969 and US20130202684; the contents of each of which are herein incorporated by reference in their entirety).

[0370] In another embodiment, liposomes may be formulated for targeted delivery. As a non-limiting example, the liposome may be formulated for targeted delivery to the liver. The liposome used for targeted delivery may include, but is not limited to, the liposomes described in and methods of making liposomes described in US Patent Publication No. US20130195967, the contents of which are herein incorporated by reference in its entirety.

[0371] In another embodiment, the polynucleotide which may encode an immunogen may be formulated in a cationic oil-in-water emulsion where the emulsion particle comprises an oil core and a cationic lipid which can interact with the polynucleotide anchoring the molecule to the emulsion particle (see International Pub. No. WO2012006380; herein incorporated by reference in its entirety).

[0372] In one embodiment, the polynucleotides may be formulated in a water-in-oil emulsion comprising a continuous hydrophobic phase in which the hydrophilic phase is dispersed. As a non-limiting example, the emulsion may be made by the methods described in International Publication No. WO201087791, herein incorporated by reference in its entirety.

[0373] In another embodiment, the lipid formulation may include at least cationic lipid, a lipid which may enhance transfection and a least one lipid which contains a hydrophilic head group linked to a lipid moiety (International Pub. No. WO2011076807 and U.S. Pub. No. 20110200582; the contents of each of which is herein incorporated by reference in their entirety). In another embodiment, the polynucleotides encoding an immunogen may be formulated in a lipid vesicle which may have crosslinks between functionalized lipid bilayers (see U.S. Pub. No. 20120177724, the contents of which is herein incorporated by reference in its entirety).

[0374] In one embodiment, the polynucleotides may be formulated in a liposome as described in International Patent Publication No. WO2013086526, herein incorporated by reference in its entirety. The polynucleotides may be encapsulated in a liposome using reverse pH gradients and/or optimized internal buffer compositions as described in International Patent Publication No. WO2013086526, herein incorporated by reference in its entirety.

[0375] In one embodiment, the pharmaceutical compositions may be formulated in liposomes such as, but not limited to, DiLa2 liposomes (Marina Biotech, Bothell, Wash.), SMARTICLES® (Marina Biotech, Bothell, Wash.), neutral DOPC (1,2-dioleoyl-sn-glycero-3-phosphocholine) based liposomes (e.g., siRNA delivery for ovarian cancer (Landen et al. Cancer Biology & Therapy 2006 5(12)1708-1713); herein incorporated by reference in its entirety) and hyaluronan-coated liposomes (Quiet Therapeutics, Israel).

[0376] In one embodiment, the cationic lipid may be a low molecular weight cationic lipid such as those described in US Patent Application No. 20130090372, the contents of which are herein incorporated by reference in its entirety.

[0377] In one embodiment, the polynucleotides may be formulated in a lipid vesicle which may have crosslinks between functionalized lipid bilayers.

[0378] In one embodiment, the polynucleotides may be formulated in a liposome comprising a cationic lipid. The liposome may have a molar ratio of nitrogen atoms in the cationic lipid to the phosphates in the RNA (N:P ratio) of between 1:1 and 20:1 as described in International Publication No. WO2013006825, herein incorporated by reference in its entirety. In another embodiment, the liposome may have a N:P ratio of greater than 20:1 or less than 1:1.

[0379] In one embodiment, the polynucleotides may be formulated in a lipid-polycation complex. The formation of the lipid-polycation complex may be accomplished by methods known in the art and/or as described in U.S. Pub. No. 20120178702, herein incorporated by reference in its entirety. As a non-limiting example, the polycation may include a cationic peptide or a polypeptide such as, but not limited to, polylysine, polyornithine and/or polyarginine and the cationic peptides described in International Pub. No. WO2012013326 or US Patent Pub. No. US20130142818; each of which is herein incorporated by reference in its entirety. In another embodiment, the polynucleotides may be formulated in a lipid-polycation complex which may further include a neutral lipid such as, but not limited to, cholesterol or dioleoyl phosphatidylethanolamine (DOPE).

[0380] In one embodiment, the polynucleotide may be formulated in an aminoalcohol lipidoid. Aminoalcohol lipidoids which may be used in the present invention may be prepared by the methods described in U.S. Pat. No. 8,450,298, herein incorporated by reference in its entirety.

[0381] The liposome formulation may be influenced by, but not limited to, the selection of the cationic lipid component, the degree of cationic lipid saturation, the nature of the PEGylation, ratio of all components and biophysical parameters such as size. In one example by Semple et al. (Semple et al. Nature Biotech. 2010 28:172-176; herein incorporated by reference in its entirety), the liposome formulation was composed of 57.1% cationic lipid, 7.1% dipalmitoylphosphatidylcholine, 34.3% cholesterol, and 1.4% PEG-c-DMA. As another example, changing the composition of the cationic lipid could more effectively deliver siRNA to various antigen presenting cells (Basha et al. Mol Ther. 2011 19:2186-2200; herein incorporated by reference in its entirety). In some embodiments, liposome formulations may comprise from about 35 to about 45% cationic lipid, from about 40% to about 50% cationic lipid, from about 50% to about 60% cationic lipid and/or from about 55% to about 65% cationic lipid. In some embodiments, the ratio of lipid to mRNA in liposomes may be from about 5:1 to about 20:1, from about 10:1 to about 25:1, from about 15:1 to about 30:1 and/or at least 30:1.

[0382] In some embodiments, the ratio of PEG in the lipid nanoparticle (LNP) formulations may be increased or decreased and/or the carbon chain length of the PEG lipid may be modified from C14 to C18 to alter the pharmacokinetics and/or biodistribution of the LNP formulations. As a non-limiting example, LNP formulations may contain from about 0.5% to about 3.0%, from about 1.0% to about 3.5%, from about 1.5% to about 4.0%, from about 2.0% to about 4.5%, from about 2.5% to about 5.0% and/or from about 3.0% to about 6.0% of the lipid molar ratio of PEG-c-DOMG as compared to the cationic lipid, DSPC and cholesterol. In another embodiment the PEG-c-DOMG may be replaced with a PEG lipid such as, but not limited to, PEG-DSG (1,2-Distearoyl-sn-glycerol, methoxypolyethylene glycol), PEG-DMG (1,2-Dimyristoyl-sn-glycerol) and/or PEG-DPG (1,2-Dipalmitoyl-sn-glycerol, methoxypolyethylene glycol). The cationic lipid may be selected from any lipid known in the art such as, but not limited to, DLin-MC3-DMA, DLin-DMA, C12-200 and DLin-KC2-DMA.

[0383] In one embodiment, the polynucleotides may be formulated in a lipid nanoparticle such as those described in International Publication No. WO2012170930, herein incorporated by reference in its entirety.

[0384] In one embodiment, the formulation comprising the polynucleotide is a nanoparticle which may comprise at least one lipid. The lipid may be selected from, but is not limited to, DLin-DMA, DLin-K-DMA, 98N12-5, C12-200, DLin-MC3-DMA, DLin-KC2-DMA, DODMA, PLGA, PEG, PEG-DMG, PEGylated lipids and amino alcohol lipids. In another aspect, the lipid may be a cationic lipid such as, but not limited to, DLin-DMA, DLin-D-DMA, DLin-MC3-DMA, DLin-KC2-DMA, DODMA and amino alcohol lipids. The amino alcohol cationic lipid may be the lipids described in and/or made by the methods described in US Patent Publication No. US20130150625, herein incorporated by reference in its entirety. As a non-limiting example, the cationic lipid may be 2-amino-3-[(9Z,12Z)-octadeca-9,12-dien-1-yloxy]-2-{[(9Z,2Z)-octadeca-9,12-dien-1-yloxy]methyl}propan-1-ol (Compound 1 in US20130150625); 2-amino-3-[(9Z)-octadec-9-en-1-yloxy]-2-{[(9Z)-octadec-9-en-1-yloxy]methyl}propan-1-ol (Compound 2 in US20130150625); 2-amino-3-[(9Z,12Z)-octadeca-9,12-dien-1-yloxy]-2-[(octyloxy)methyl]propan-1-ol (Compound 3 in US20130150625); and 2-(dimethylamino)-3-[(9Z,12Z)-octadeca-9,12-dien-1-yloxy]-2-{[(9Z,12Z)-octadeca-9,12-dien-1-yloxy]methyl}propan-1-ol (Compound 4 in US20130150625); or any pharmaceutically acceptable salt or stereoisomer thereof.

[0385] In one embodiment, the cationic lipid may be selected from, but not limited to, a cationic lipid described in International Publication Nos. WO2012040184, WO2011153120, WO2011149733, WO2011090965, WO2011043913, WO2011022460, WO2012061259, WO2012054365, WO2012044638, WO2010080724, WO201021865, WO2008103276, WO2013086373 and WO2013086354, U.S. Pat. Nos. 7,893,302, 7,404,969, 8,283,333, and 8,466,122 and US Patent Publication No. US20100036115, US20120202871, US20130064894, US20130129785, US20130150625, US20130178541 and US20130225836; the contents of each of which are herein incorporated by reference in their entirety. In another embodiment, the cationic lipid may be selected from, but not limited to, formula A described in International Publication Nos. WO2012040184, WO2011153120, WO2011149733, WO2011090965, WO2011043913, WO2011022460, WO2012061259, WO2012054365, WO2012044638 and WO2013116126 or US Patent Publication No. US20130178541 and US20130225836; the contents of each of which is herein incorporated by reference in their entirety. In yet another embodiment, the cationic lipid may be selected from, but not limited to, formula CLI-CLXXIX of International Publication No. WO2008103276, formula CLI-CLXXIX of U.S. Pat. No. 7,893,302, formula CLI-CLXXXXII of U.S. Pat. No. 7,404,969 and formula I-VI of US Patent Publication No. US20100036115, formula I of US Patent Publication No US20130123338; each of which is herein incorporated by reference in their entirety. As a non-limiting example, the cationic lipid may be selected from (20Z,23Z)—N,N-dimethylnonacosa-20,23-dien-10-amine, (17Z,20Z)—N,N-dimemylhexacosa-17,20-dien-9-amine, (1Z,19Z)—N5N-dimethylpentacosa-16, 19-dien-8-amine, (13Z,16Z)—N,N-dimethyldocosa-13,16-dien-5-amine, (12Z,15Z)—N,N-dimethylhenicosa-12,15-dien-4-amine, (14Z,17Z)—N,N-dimethyltricosa-14,17-dien-6-amine, (15Z,18Z)—N,N-dimethyltetracosa-15,18-dien-7-amine, (18Z,21Z)—N,N-dimethylheptacosa-18,21-dien-10-amine, (15Z,18Z)—N,N-dimethyltetracosa-15,18-dien-5-amine, (14Z,17Z)—N,N-dimethyltricosa-14,17-dien-4-amine, (19Z,22Z)—N,N-dimeihyloctacosa-19,22-dien-9-amine, (18Z,21 Z)—N,N-dimethylheptacosa-18,21-dien-8-amine, (17Z,20Z)—N,N-dimethylhexacosa-17,20-dien-7-amine, (16Z,19Z)—N,N-dimethylpentacosa-16,19-dien-6-amine, (22Z,25Z)—N,N-dimethylhentriaconta-22,25-dien-10-amine, (21Z,24Z)—N,N-dimethyltriaconta-21,24-dien-9-amine, (18Z)—N,N-dimetylheptacos-18-en-10-amine, (17Z)—N,N-dimethylhexacos-17-en-9-amine, (19Z,22Z)—N,N-dimethyloctacosa-19,22-dien-7-amine, N,N-dimethylheptacosan-10-amine, (20Z,23Z)—N-ethyl-N-methylnonacosa-20,23-dien-10-amine, 1-[(11 Z,14Z)-1-nonylicosa-11,14-dien-1-yl] pyrrolidine, (20Z)—N,N-dimethylheptacos-20-en-10-amine, (15Z)—N,N-dimethyl eptacos-15-en-10-amine, (14Z)—N,N-dimethylnonacos-14-en-10-amine, (17Z)—N,N-dimethylnonacos-17-en-10-amine, (24Z)—N,N-dimethyltritriacont-24-en-10-amine, (20Z)—N,N-dimethylnonacos-20-en-10-amine, (22Z)—N,N-dimethylhentriacont-22-en-10-amine, (16Z)—N,N-dimethylpentacos-16-en-8-amine, (12Z,15Z)—N,N-dimethyl-2-nonylhenicosa-12,15-dien-1-amine, (13Z,16Z)—N,N-dimethyl-3-nonyldocosa-13,16-dien-1-amine, N,N-dimethyl-1-[(1S,2R)-2-octylcyclopropyl]eptadecan-8-amine, 1-[(1S,2R)-2-hexylcyclopropyl]-N,N-dimethylnonadecan-10-amine, N,N-dimethyl-1-[(1S,2R)-2-octylcyclopropyl]nonadecan-10-amine, N,N-dimethyl-21-[(1S,2R)-2-octylcyclopropyl]henicosan-10-amine,N,N-dimethyl-1-[(1S,2S)-2-{[(1R,2R)-2-pentylcycIopropyl]methyl}cyclopropyl]nonadecan-10-amine,N,N-dimethyl-1-[(1S,2R)-2-octylcyclopropyl]hexadecan-8-amine, N,N-dimethyl-[(1R,2S)-2-undecyIcyclopropyl]tetradecan-5-amine, N,N-dimethyl-3-{7-[(1S,2R)-2-octylcyclopropyl]heptyl}dodecan-1-amine, 1-[(1R,2S)-2-heptylcyclopropyl]-N,N-dimethyloctadecan-9-amine, 1-[(1S,2R)-2-decylcyclopropyl]-N,N-dimethylpentadecan-6-amine, N,N-dimethyl-1-[(1S,2R)-2-octylcyclopropyl]pentadecan-8-amine, R—N,N-dimethyl-1-[(9Z,12Z)-octadeca-9,12-dien-1-yloxy]-3-(octyloxy)propan-2-amine, S—N,N-dimethyl-1-[(9Z,12Z)-octadeca-9,12-dien-1-yloxy]-3-(octyloxy)propan-2-amine, 1-{2-[(9Z,12Z)-octadeca-9,12-dien-1-yloxy]-1-[(octyloxy)methyl]ethyl}pyrrolidine, (2S)—N,N-dimethyl-1-[(9Z,12Z)-octadeca-9,12-dien-1-yloxy]-3-[(5Z)-oct-5-en-1-yloxy]propan-2-amine, 1-{2-[(9Z,12Z)-octadeca-9,12-dien-1-yloxy]-1-[(octyloxy)methyl]ethyl}azetidine, (2S)-1-(hexyloxy)-N,N-dimethyl-3-[(9Z,12Z)-octadeca-9,12-dien-1-yloxy]propan-2-amine, (2S)-1-(heptyloxy)-N,N-dimethyl-3-[(9Z,12Z)-octadeca-9,12-dien-1-yloxy]propan-2-amine, N,N-dimethyl-1-(nonyloxy)-3-[(9Z,12Z)-octadeca-9,12-dien-1-yloxy]propan-2-amine, N,N-dimethyl-1-[(9Z)-octadec-9-en-1-yloxy]-3-(octyloxy)propan-2-amine; (2S)—N,N-dimethyl-1-[(6Z,9Z,12Z)-octadeca-6,9,12-trien-1-yloxy]-3-(octyloxy)propan-2-amine, (2S)-1-[(11Z,14Z)-icosa-11,14-dien-1-yloxy]-N,N-dimethyl-3-(pentyloxy)propan-2-amine, (2S)-1-(hexyloxy)-3-[(11Z,14Z)-icosa-11,14-dien-1-yloxy]-N,N-dimethylpropan-2-amine, 1-[(11Z,14Z)-icosa-11,14-dien-1-yloxy]-N,N-dimethyl-3-(octyloxy)propan-2-amine, 1-[(13Z,16Z)-docosa-13,16-dien-1-yloxy]-N,N-dimethyl-3-(octyloxy)propan-2-amine, (2S)-1-[(13Z,16Z)-docosa-13,16-dien-1-yloxy]-3-(hexyloxy)-N,N-dimethylpropan-2-amine, (2S)-1-[(13Z)-docos-13-en-1-yloxy]-3-(hexyloxy)-N,N-dimethylpropan-2-amine, 1-[(13Z)-docos-13-en-1-yloxy]-N,N-dimethyl-3-(octyloxy)propan-2-amine, 1-[(9Z)-hexadec-9-en-1-yloxy]-N,N-dimethyl-3-(octyloxy)propan-2-amine, (2R)—N,N-dimethyl-H(1-metoyloctyl)oxy]-3-[(9Z,12Z)-octadeca-9,12-dien-1-yloxy]propan-2-amine, (2R)-1-[(3,7-dimethyloctyl)oxy]-N,N-dimethyl-3-[(9Z,12Z)-octadeca-9,12-dien-1-yloxy]propan-2-amine, N,N-dimethyl-1-(octyloxy)-3-({8-[(1S,2S)-2-{[(1R,2R)-2-pentylcyclopropyl]methyl}cyclopropyl]octyl}oxy)propan-2-amine, N,N-dimethyl-1-{[8-(2-oclylcyclopropyl)octyl]oxy}-3-(octyloxy)propan-2-amine and (11E,20Z,23Z)—N,N-dimethylnonacosa-11,20,2-trien-10-amine or a pharmaceutically acceptable salt or stereoisomer thereof.

[0386] In one embodiment, the lipid may be a cleavable lipid such as those described in International Publication No. WO2012170889, herein incorporated by reference in its entirety.

[0387] In another embodiment, the lipid may be a cationic lipid such as, but not limited to, Formula (I) of U.S. Patent Application No. US20130064894, the contents of which are herein incorporated by reference in its entirety.

[0388] In one embodiment, the cationic lipid may be synthesized by methods known in the art and/or as described in International Publication Nos. WO2012040184, WO2011153120, WO2011149733, WO2011090965, WO2011043913, WO2011022460, WO2012061259, WO2012054365, WO2012044638, WO2010080724, WO201021865, WO2013086373 and WO2013086354; the contents of each of which are herein incorporated by reference in their entirety.

[0389] In another embodiment, the cationic lipid may be a trialkyl cationic lipid. Non-limiting examples of trialkyl cationic lipids and methods of making and using the trialkyl cationic lipids are described in International Patent Publication No. WO2013126803, the contents of which are herein incorporated by reference in its entirety.

[0390] In one embodiment, the LNP formulations of the polynucleotides may contain PEG-c-DOMG at 3% lipid molar ratio. In another embodiment, the LNP formulations polynucleotides may contain PEG-c-DOMG at 1.5% lipid molar ratio.

[0391] In one embodiment, the pharmaceutical compositions of the polynucleotides may include at least one of the PEGylated lipids described in International Publication No. WO2012099755, herein incorporated by reference.

[0392] In one embodiment, the LNP formulation may contain PEG-DMG 2000 (1,2-dimyristoyl-sn-glycero-3-phophoethanolamine-N-[methoxy(polyethylene glycol)-2000). In one embodiment, the LNP formulation may contain PEG-DMG 2000, a cationic lipid known in the art and at least one other component. In another embodiment, the LNP formulation may contain PEG-DMG 2000, a cationic lipid known in the art, DSPC and cholesterol. As a non-limiting example, the LNP formulation may contain PEG-DMG 2000, DLin-DMA, DSPC and cholesterol. As another non-limiting example the LNP formulation may contain PEG-DMG 2000, DLin-DMA, DSPC and cholesterol in a molar ratio of 2:40:10:48 (see e.g., Geall et al., Nonviral delivery of self-amplifying RNA vaccines, PNAS 2012; PMID: 22908294; herein incorporated by reference in its entirety).

[0393] In one embodiment, the LNP formulation may be formulated by the methods described in International Publication Nos. WO2011127255 or WO2008103276, the contents of each of which is herein incorporated by reference in their entirety. As a non-limiting example, the polynucleotides described herein may be encapsulated in LNP formulations as described in WO2011127255 and/or WO2008103276; each of which is herein incorporated by reference in their entirety.

[0394] In one embodiment, the polynucleotides described herein may be formulated in a nanoparticle to be delivered by a parenteral route as described in U.S. Pub. No. US20120207845; the contents of which are herein incorporated by reference in its entirety.

[0395] In one embodiment, the polynucleotides may be formulated in a lipid nanoparticle made by the methods described in US Patent Publication No US20130156845 or International Publication No WO2013093648 or WO2012024526, each of which is herein incorporated by reference in its entirety.

[0396] The lipid nanoparticles described herein may be made in a sterile environment by the system and/or methods described in US Patent Publication No. US20130164400, herein incorporated by reference in its entirety.

[0397] In one embodiment, the LNP formulation may be formulated in a nanoparticle such as a nucleic acid-lipid particle described in U.S. Pat. No. 8,492,359, the contents of which are herein incorporated by reference in its entirety. As a non-limiting example, the lipid particle may comprise one or more active agents or therapeutic agents; one or more cationic lipids comprising from about 50 mol % to about 85 mol % of the total lipid present in the particle; one or more non-cationic lipids comprising from about 13 mol % to about 49.5 mol % of the total lipid present in the particle; and one or more conjugated lipids that inhibit aggregation of particles comprising from about 0.5 mol % to about 2 mol % of the total lipid present in the particle. The nucleic acid in the nanoparticle may be the polynucleotides described herein and/or are known in the art.

[0398] In one embodiment, the LNP formulation may be formulated by the methods described in International Publication Nos. WO2011127255 or WO2008103276, the contents of each of which are herein incorporated by reference in their entirety. As a non-limiting example, modified RNA described herein may be encapsulated in LNP formulations as described in WO2011127255 and/or WO2008103276; the contents of each of which are herein incorporated by reference in their entirety.

[0399] In one embodiment, LNP formulations described herein may comprise a polycationic composition. As a non-limiting example, the polycationic composition may be selected from formula 1-60 of US Patent Publication No. US20050222064; the content of which is herein incorporated by reference in its entirety. In another embodiment, the LNP formulations comprising a polycationic composition may be used for the delivery of the modified RNA described herein in vivo and/or in vitro.

[0400] In one embodiment, the LNP formulations described herein may additionally comprise a permeability enhancer molecule. Non-limiting permeability enhancer molecules are described in US Patent Publication No. US20050222064; the content of which is herein incorporated by reference in its entirety.

[0401] In one embodiment, the pharmaceutical compositions may be formulated in liposomes such as, but not limited to, DiLa2 liposomes (Marina Biotech, Bothell, Wash.), SMARTICLES® (Marina Biotech, Bothell, Wash.), neutral DOPC (1,2-dioleoyl-sn-glycero-3-phosphocholine) based liposomes (e.g., siRNA delivery for ovarian cancer (Landen et al. Cancer Biology & Therapy 2006 5(12)1708-1713); herein incorporated by reference in its entirety) and hyaluronan-coated liposomes (Quiet Therapeutics, Israel).

[0402] In one embodiment, the polynucleotides may be formulated in a lyophilized gel-phase liposomal composition as described in US Publication No. US2012060293, herein incorporated by reference in its entirety.

[0403] The nanoparticle formulations may comprise a phosphate conjugate. The phosphate conjugate may increase in vivo circulation times and/or increase the targeted delivery of the nanoparticle. Phosphate conjugates for use with the present invention may be made by the methods described in International Application No. WO2013033438 or US Patent Publication No. US20130196948, the contents of each of which are herein incorporated by reference in its entirety. As a non-limiting example, the phosphate conjugates may include a compound of any one of the formulas described in International Application No. WO2013033438, herein incorporated by reference in its entirety.

[0404] The nanoparticle formulation may comprise a polymer conjugate. The polymer conjugate may be a water soluble conjugate. The polymer conjugate may have a structure as described in U.S. Patent Application No. 20130059360, the contents of which are herein incorporated by reference in its entirety. In one aspect, polymer conjugates with the polynucleotides of the present invention may be made using the methods and/or segmented polymeric reagents described in U.S. Patent Application No. 20130072709, herein incorporated by reference in its entirety. In another aspect, the polymer conjugate may have pendant side groups comprising ring moieties such as, but not limited to, the polymer conjugates described in US Patent Publication No. US20130196948, the contents of which is herein incorporated by reference in its entirety.

[0405] The nanoparticle formulations may comprise a conjugate to enhance the delivery of nanoparticles of the present invention in a subject. Further, the conjugate may inhibit phagocytic clearance of the nanoparticles in a subject. In one aspect, the conjugate may be a “self” peptide designed from the human membrane protein CD47 (e.g., the “self” particles described by Rodriguez et al (Science 2013 339, 971-975), herein incorporated by reference in its entirety). As shown by Rodriguez et al. the self-peptides delayed macrophage-mediated clearance of nanoparticles which enhanced delivery of the nanoparticles. In another aspect, the conjugate may be the membrane protein CD47 (e.g., see Rodriguez et al. Science 2013 339, 971-975, herein incorporated by reference in its entirety). Rodriguez et al. showed that, similarly to “self” peptides, CD47 can increase the circulating particle ratio in a subject as compared to scrambled peptides and PEG coated nanoparticles.

[0406] In one embodiment, the polynucleotides of the present invention are formulated in nanoparticles which comprise a conjugate to enhance the delivery of the nanoparticles of the present invention in a subject. The conjugate may be the CD47 membrane or the conjugate may be derived from the CD47 membrane protein, such as the “self” peptide described previously. In another aspect the nanoparticle may comprise PEG and a conjugate of CD47 or a derivative thereof. In yet another aspect, the nanoparticle may comprise both the “self” peptide described above and the membrane protein CD47.

[0407] In another aspect, a “self” peptide and/or CD47 protein may be conjugated to a virus-like particle or pseudovirion, as described herein for delivery of the polynucleotides of the present invention.

[0408] In another embodiment, pharmaceutical compositions comprising the polynucleotides of the present invention and a conjugate which may have a degradable linkage. Non-limiting examples of conjugates include an aromatic moiety comprising an ionizable hydrogen atom, a spacer moiety, and a water-soluble polymer. As a non-limiting example, pharmaceutical compositions comprising a conjugate with a degradable linkage and methods for delivering such pharmaceutical compositions are described in US Patent Publication No. US20130184443, the contents of which are herein incorporated by reference in its entirety.

[0409] The nanoparticle formulations may be a carbohydrate nanoparticle comprising a carbohydrate carrier and a polynucleotide. As a non-limiting example, the carbohydrate carrier may include, but is not limited to, an anhydride-modified phytoglycogen or glycogen-type material, phtoglycogen octenyl succinate, phytoglycogen beta-dextrin, anhydride-modified phytoglycogen beta-dextrin. (See e.g., International Publication No. WO2012109121; the contents of which are herein incorporated by reference in its entirety).

[0410] Nanoparticle formulations of the present invention may be coated with a surfactant or polymer in order to improve the delivery of the particle. In one embodiment, the nanoparticle may be coated with a hydrophilic coating such as, but not limited to, PEG coatings and/or coatings that have a neutral surface charge. The hydrophilic coatings may help to deliver nanoparticles with larger payloads such as, but not limited to, polynucleotides within the central nervous system. As a non-limiting example nanoparticles comprising a hydrophilic coating and methods of making such nanoparticles are described in US Patent Publication No. US20130183244, the contents of which are herein incorporated by reference in its entirety.

[0411] In one embodiment, the lipid nanoparticles of the present invention may be hydrophilic polymer particles. Non-limiting examples of hydrophilic polymer particles and methods of making hydrophilic polymer particles are described in US Patent Publication No. US20130210991, the contents of which are herein incorporated by reference in its entirety.

[0412] In another embodiment, the lipid nanoparticles of the present invention may be hydrophobic polymer particles.

[0413] Lipid nanoparticle formulations may be improved by replacing the cationic lipid with a biodegradable cationic lipid which is known as a rapidly eliminated lipid nanoparticle (reLNP). Ionizable cationic lipids, such as, but not limited to, DLinDMA, DLin-KC2-DMA, and DLin-MC3-DMA, have been shown to accumulate in plasma and tissues over time and may be a potential source of toxicity. The rapid metabolism of the rapidly eliminated lipids can improve the tolerability and therapeutic index of the lipid nanoparticles by an order of magnitude from a 1 mg/kg dose to a 10 mg/kg dose in rat. Inclusion of an enzymatically degraded ester linkage can improve the degradation and metabolism profile of the cationic component, while still maintaining the activity of the reLNP formulation. The ester linkage can be internally located within the lipid chain or it may be terminally located at the terminal end of the lipid chain. The internal ester linkage may replace any carbon in the lipid chain.

[0414] In one embodiment, the internal ester linkage may be located on either side of the saturated carbon.

[0415] In one embodiment, an immune response may be elicited by delivering a lipid nanoparticle which may include a nanospecies, a polymer and an immunogen. (U.S. Publication No. 20120189700 and International Publication No. WO2012099805; each of which is herein incorporated by reference in their entirety). The polymer may encapsulate the nanospecies or partially encapsulate the nanospecies. The immunogen may be a recombinant protein, a modified RNA and/or a polynucleotide described herein. In one embodiment, the lipid nanoparticle may be formulated for use in a vaccine such as, but not limited to, against a pathogen.

[0416] Lipid nanoparticles may be engineered to alter the surface properties of particles so the lipid nanoparticles may penetrate the mucosal barrier. Mucus is located on mucosal tissue such as, but not limited to, oral (e.g., the buccal and esophageal membranes and tonsil tissue), ophthalmic, gastrointestinal (e.g., stomach, small intestine, large intestine, colon, rectum), nasal, respiratory (e.g., nasal, pharyngeal, tracheal and bronchial membranes), genital (e.g., vaginal, cervical and urethral membranes). Nanoparticles larger than 10-200 nm which are preferred for higher drug encapsulation efficiency and the ability to provide the sustained delivery of a wide array of drugs have been thought to be too large to rapidly diffuse through mucosal barriers. Mucus is continuously secreted, shed, discarded or digested and recycled so most of the trapped particles may be removed from the mucosla tissue within seconds or within a few hours. Large polymeric nanoparticles (200 nm-500 nm in diameter) which have been coated densely with a low molecular weight polyethylene glycol (PEG) diffused through mucus only 4 to 6-fold lower than the same particles diffusing in water (Lai et al. PNAS 2007 104(5):1482-487; Lai et al. Adv Drug Deliv Rev. 2009 61(2): 158-171; each of which is herein incorporated by reference in their entirety). The transport of nanoparticles may be determined using rates of permeation and/or fluorescent microscopy techniques including, but not limited to, fluorescence recovery after photobleaching (FRAP) and high resolution multiple particle tracking (MPT). As a non-limiting example, compositions which can penetrate a mucosal barrier may be made as described in U.S. Pat. No. 8,241,670 or International Patent Publication No. WO2013110028, the contents of each of which are herein incorporated by reference in its entirety.

[0417] The lipid nanoparticle engineered to penetrate mucus may comprise a polymeric material (i.e. a polymeric core) and/or a polymer-vitamin conjugate and/or a tri-block co-polymer. The polymeric material may include, but is not limited to, polyamines, polyethers, polyamides, polyesters, polycarbamates, polyureas, polycarbonates, poly(styrenes), polyimides, polysulfones, polyurethanes, polyacetylenes, polyethylenes, polyethyeneimines, polyisocyanates, polyacrylates, polymethacrylates, polyacrylonitriles, and polyarylates. The polymeric material may be biodegradable and/or biocompatible. Non-limiting examples of biocompatible polymers are described in International Patent Publication No. WO2013116804, the contents of which are herein incorporated by reference in its entirety. The polymeric material may additionally be irradiated. As a non-limiting example, the polymeric material may be gamma irradiated (See e.g., International App. No. WO201282165, herein incorporated by reference in its entirety). Non-limiting examples of specific polymers include poly(caprolactone) (PCL), ethylene vinyl acetate polymer (EVA), poly(lactic acid) (PLA), poly(L-lactic acid) (PLLA), poly(glycolic acid) (PGA), poly(lactic acid-co-glycolic acid) (PLGA), poly(L-lactic acid-co-glycolic acid) (PLLGA), poly(D,L-lactide) (PDLA), poly(L-lactide) (PLLA), poly(D,L-lactide-co-caprolactone), poly(D,L-lactide-co-caprolactone-co-glycolide), poly(D,L-lactide-co-PEO-co-D,L-lactide), poly(D,L-lactide-co-PPO-co-D,L-lactide), polyalkyl cyanoacralate, polyurethane, poly-L-lysine (PLL), hydroxypropyl methacrylate (HPMA), polyethyleneglycol, poly-L-glutamic acid, poly(hydroxy acids), polyanhydrides, polyorthoesters, poly(ester amides), polyamides, poly(ester ethers), polycarbonates, polyalkylenes such as polyethylene and polypropylene, polyalkylene glycols such as poly(ethylene glycol) (PEG), polyalkylene oxides (PEO), polyalkylene terephthalates such as poly(ethylene terephthalate), polyvinyl alcohols (PVA), polyvinyl ethers, polyvinyl esters such as poly(vinyl acetate), polyvinyl halides such as poly(vinyl chloride) (PVC), polyvinylpyrrolidone, polysiloxanes, polystyrene (PS), polyurethanes, derivatized celluloses such as alkyl celluloses, hydroxyalkyl celluloses, cellulose ethers, cellulose esters, nitro celluloses, hydroxypropylcellulose, carboxymethylcellulose, polymers of acrylic acids, such as poly(methyl(meth)acrylate) (PMMA), poly(ethyl(meth)acrylate), poly(butyl(meth)acrylate), poly(isobutyl(meth)acrylate), poly(hexyl(meth)acrylate), poly(isodecyl(meth)acrylate), poly(lauryl(meth)acrylate), poly(phenyl(meth)acrylate), poly(methyl acrylate), poly(isopropyl acrylate), poly(isobutyl acrylate), poly(octadecyl acrylate) and copolymers and mixtures thereof, polydioxanone and its copolymers, polyhydroxyalkanoates, polypropylene fumarate, polyoxymethylene, poloxamers, poly(ortho)esters, poly(butyric acid), poly(valeric acid), poly(lactide-co-caprolactone), PEG-PLGA-PEG and trimethylene carbonate, polyvinylpyrrolidone. The lipid nanoparticle may be coated or associated with a co-polymer such as, but not limited to, a block co-polymer (such as a branched polyether-polyamide block copolymer described in International Publication No. WO2013012476, herein incorporated by reference in its entirety), and (poly(ethylene glycol))-(poly(propylene oxide))-(poly(ethylene glycol)) triblock copolymer (see e.g., US Publication 20120121718 and US Publication 20100003337 and U.S. Pat. No. 8,263,665; each of which is herein incorporated by reference in their entirety). The co-polymer may be a polymer that is generally regarded as safe (GRAS) and the formation of the lipid nanoparticle may be in such a way that no new chemical entities are created. For example, the lipid nanoparticle may comprise poloxamers coating PLGA nanoparticles without forming new chemical entities which are still able to rapidly penetrate human mucus (Yang et al. Angew. Chem. Int. Ed. 2011 50:2597-2600; the contents of which are herein incorporated by reference in its entirety). A non-limiting scalable method to produce nanoparticles which can penetrate human mucus is described by Xu et al. (See e.g., J Control Release 2013, 170(2):279-86; the contents of which are herein incorporated by reference in its entirety).

[0418] The vitamin of the polymer-vitamin conjugate may be vitamin E. The vitamin portion of the conjugate may be substituted with other suitable components such as, but not limited to, vitamin A, vitamin E, other vitamins, cholesterol, a hydrophobic moiety, or a hydrophobic component of other surfactants (e.g., sterol chains, fatty acids, hydrocarbon chains and alkylene oxide chains).

[0419] The lipid nanoparticle engineered to penetrate mucus may include surface altering agents such as, but not limited to, polynucleotides, anionic proteins (e.g., bovine serum albumin), surfactants (e.g., cationic surfactants such as for example dimethyldioctadecyl-ammonium bromide), sugars or sugar derivatives (e.g., cyclodextrin), nucleic acids, polymers (e.g., heparin, polyethylene glycol and poloxamer), mucolytic agents (e.g., N-acetylcysteine, mugwort, bromelain, papain, clerodendrum, acetylcysteine, bromhexine, carbocisteine, eprazinone, mesna, ambroxol, sobrerol, domiodol, letosteine, stepronin, tiopronin, gelsolin, thymosin β4 dornase alfa, neltenexine, erdosteine) and various DNases including rhDNase. The surface altering agent may be embedded or enmeshed in the particle's surface or disposed (e.g., by coating, adsorption, covalent linkage, or other process) on the surface of the lipid nanoparticle. (see e.g., US Publication 20100215580 and US Publication 20080166414 and US20130164343; each of which is herein incorporated by reference in their entirety).

[0420] In one embodiment, the mucus penetrating lipid nanoparticles may comprise at least one polynucleotide described herein. The polynucleotide may be encapsulated in the lipid nanoparticle and/or disposed on the surface of the particle. The polynucleotide may be covalently coupled to the lipid nanoparticle. Formulations of mucus penetrating lipid nanoparticles may comprise a plurality of nanoparticles. Further, the formulations may contain particles which may interact with the mucus and alter the structural and/or adhesive properties of the surrounding mucus to decrease mucoadhesion which may increase the delivery of the mucus penetrating lipid nanoparticles to the mucosal tissue.

[0421] In another embodiment, the mucus penetrating lipid nanoparticles may be a hypotonic formulation comprising a mucosal penetration enhancing coating. The formulation may be hypotonice for the epithelium to which it is being delivered. Non-limiting examples of hypotonic formulations may be found in International Patent Publication No. WO2013110028, the contents of which are herein incorporated by reference in its entirety.

[0422] In one embodiment, in order to enhance the delivery through the mucosal barrier the formulation may comprise or be a hypotonic solution. Hypotonic solutions were found to increase the rate at which mucoinert particles such as, but not limited to, mucus-penetrating particles, were able to reach the vaginal epithelial surface (See e.g., Ensign et al. Biomaterials 2013 34(28):6922-9; the contents of which is herein incorporated by reference in its entirety).

[0423] In one embodiment, the polynucleotide is formulated as a lipoplex, such as, without limitation, the ATUPLEX™ system, the DACC system, the DBTC system and other siRNA-lipoplex technology from Silence Therapeutics (London, United Kingdom), STEMFECT™ from STEMGENT® (Cambridge, Mass.), and polyethylenimine (PEI) or protamine-based targeted and non-targeted delivery of nucleic acids (Aleku et al. Cancer Res. 2008 68:9788-9798; Strumberg et al. Int J Clin Pharmacol Ther 2012 50:76-78; Santel et al., Gene Ther 2006 13:1222-1234; Santel et al., Gene Ther 2006 13:1360-1370; Gutbier et al., Pulm Pharmacol. Ther. 2010 23:334-344; Kaufmann et al. Microvasc Res 2010 80:286-293 Weide et al. J Immunother. 2009 32:498-507; Weide et al. J Immunother. 2008 31:180-188; Pascolo Expert Opin. Biol. Ther. 4:1285-1294; Fotin-Mleczek et al., 2011 J. Immunother. 34:1-15; Song et al., Nature Biotechnol. 2005, 23:709-717; Peer et al., Proc Natl Acad Sci USA. 2007 6; 104:4095-4100; deFougerolles Hum Gene Ther. 2008 19:125-132; all of which are incorporated herein by reference in its entirety).

[0424] In one embodiment such formulations may also be constructed or compositions altered such that they passively or actively are directed to different cell types in vivo, including but not limited to hepatocytes, immune cells, tumor cells, endothelial cells, antigen presenting cells, and leukocytes (Akinc et al. Mol Ther. 2010 18:1357-1364; Song et al., Nat Biotechnol. 2005 23:709-717; Judge et al., J Clin Invest. 2009 119:661-673; Kaufmann et al., Microvasc Res 2010 80:286-293; Santel et al., Gene Ther 2006 13:1222-1234; Santel et al., Gene Ther 2006 13:1360-1370; Gutbier et al., Pulm Pharmacol. Ther. 2010 23:334-344; Basha et al., Mol. Ther. 2011 19:2186-2200; Fenske and Cullis, Expert Opin Drug Deliv. 2008 5:25-44; Peer et al., Science. 2008 319:627-630; Peer and Lieberman, Gene Ther. 2011 18:1127-1133; all of which are incorporated herein by reference in its entirety). One example of passive targeting of formulations to liver cells includes the DLin-DMA, DLin-KC2-DMA and DLin-MC3-DMA-based lipid nanoparticle formulations which have been shown to bind to apolipoprotein E and promote binding and uptake of these formulations into hepatocytes in vivo (Akinc et al. Mol Ther. 2010 18:1357-1364; herein incorporated by reference in its entirety). Formulations can also be selectively targeted through expression of different ligands on their surface as exemplified by, but not limited by, folate, transferrin, N-acetylgalactosamine (GalNAc), and antibody targeted approaches (Kolhatkar et al., Curr Drug Discov Technol. 2011 8:197-206; Musacchio and Torchilin, Front Biosci. 2011 16:1388-1412; Yu et al., Mol Membr Biol. 2010 27:286-298; Patil et al., Crit Rev Ther Drug Carrier Syst. 2008 25:1-61; Benoit et al., Biomacromolecules. 2011 12:2708-2714; Zhao et al., Expert Opin Drug Deliv. 2008 5:309-319; Akinc et al., Mol Ther. 2010 18:1357-1364; Srinivasan et al., Methods Mol Biol. 2012 820:105-116; Ben-Arie et al., Methods Mol Biol. 2012 757:497-507; Peer 2010 J Control Release. 20:63-68; Peer et al., Proc Natl Acad Sci USA. 2007 104:4095-4100; Kim et al., Methods Mol Biol. 2011 721:339-353; Subramanya et al., Mol Ther. 2010 18:2028-2037; Song et al., Nat Biotechnol. 2005 23:709-717; Peer et al., Science. 2008 319:627-630; Peer and Lieberman, Gene Ther. 2011 18:1127-1133; all of which are incorporated herein by reference in its entirety).

[0425] In one embodiment, the polynucleotide is formulated as a solid lipid nanoparticle. A solid lipid nanoparticle (SLN) may be spherical with an average diameter between 10 to 1000 nm. SLN possess a solid lipid core matrix that can solubilize lipophilic molecules and may be stabilized with surfactants and/or emulsifiers. In a further embodiment, the lipid nanoparticle may be a self-assembly lipid-polymer nanoparticle (see Zhang et al., ACS Nano, 2008, 2 (8), pp 1696-1702; the contents of which are herein incorporated by reference in its entirety). As a non-limiting example, the SLN may be the SLN described in International Patent Publication No. WO2013105101, the contents of which are herein incorporated by reference in its entirety. As another non-limiting example, the SLN may be made by the methods or processes described in International Patent Publication No. WO2013105101, the contents of which are herein incorporated by reference in its entirety.

[0426] Liposomes, lipoplexes, or lipid nanoparticles may be used to improve the efficacy of polynucleotides directed protein production as these formulations may be able to increase cell transfection by the polynucleotide; and/or increase the translation of encoded protein. One such example involves the use of lipid encapsulation to enable the effective systemic delivery of polyplex plasmid DNA (Heyes et al., Mol Ther. 2007 15:713-720; herein incorporated by reference in its entirety). The liposomes, lipoplexes, or lipid nanoparticles may also be used to increase the stability of the polynucleotide.

[0427] In one embodiment, the polynucleotides of the present invention can be formulated for controlled release and/or targeted delivery. As used herein, “controlled release” refers to a pharmaceutical composition or compound release profile that conforms to a particular pattern of release to effect a therapeutic outcome. In one embodiment, the polynucleotides may be encapsulated into a delivery agent described herein and/or known in the art for controlled release and/or targeted delivery. As used herein, the term “encapsulate” means to enclose, surround or encase. As it relates to the formulation of the compounds of the invention, encapsulation may be substantial, complete or partial. The term “substantially encapsulated” means that at least greater than 50, 60, 70, 80, 85, 90, 95, 96, 97, 98, 99, 99.9, 99.9 or greater than 99.999% of the pharmaceutical composition or compound of the invention may be enclosed, surrounded or encased within the delivery agent. “Partially encapsulation” means that less than 10, 10, 20, 30, 40 50 or less of the pharmaceutical composition or compound of the invention may be enclosed, surrounded or encased within the delivery agent. Advantageously, encapsulation may be determined by measuring the escape or the activity of the pharmaceutical composition or compound of the invention using fluorescence and/or electron micrograph. For example, at least 1, 5, 10, 20, 30, 40, 50, 60, 70, 80, 85, 90, 95, 96, 97, 98, 99, 99.9, 99.99 or greater than 99.99% of the pharmaceutical composition or compound of the invention are encapsulated in the delivery agent.

[0428] In one embodiment, the controlled release formulation may include, but is not limited to, tri-block co-polymers. As a non-limiting example, the formulation may include two different types of tri-block co-polymers (International Pub. No. WO2012131104 and WO2012131106; each of which is herein incorporated by reference in its entirety).

[0429] In another embodiment, the polynucleotides may be encapsulated into a lipid nanoparticle or a rapidly eliminated lipid nanoparticle and the lipid nanoparticles or a rapidly eliminated lipid nanoparticle may then be encapsulated into a polymer, hydrogel and/or surgical sealant described herein and/or known in the art. As a non-limiting example, the polymer, hydrogel or surgical sealant may be PLGA, ethylene vinyl acetate (EVAc), poloxamer, GELSITE® (Nanotherapeutics, Inc. Alachua, Fla.), HYLENEX® (Halozyme Therapeutics, San Diego Calif.), surgical sealants such as fibrinogen polymers (Ethicon Inc. Cornelia, Ga.), TISSELL® (Baxter International, Inc Deerfield, Ill.), PEG-based sealants, and COSEAL® (Baxter International, Inc Deerfield, Ill.).

[0430] In another embodiment, the lipid nanoparticle may be encapsulated into any polymer known in the art which may form a gel when injected into a subject. As another non-limiting example, the lipid nanoparticle may be encapsulated into a polymer matrix which may be biodegradable.

[0431] In one embodiment, the polynucleotide formulation for controlled release and/or targeted delivery may also include at least one controlled release coating. Controlled release coatings include, but are not limited to, OPADRY®, polyvinylpyrrolidone/vinyl acetate copolymer, polyvinylpyrrolidone, hydroxypropyl methylcellulose, hydroxypropyl cellulose, hydroxyethyl cellulose, EUDRAGIT RL®, EUDRAGIT RS® and cellulose derivatives such as ethylcellulose aqueous dispersions (AQUACOAT® and SURELEASE®).

[0432] In one embodiment, the controlled release and/or targeted delivery formulation may comprise at least one degradable polyester which may contain polycationic side chains. Degradable polyesters include, but are not limited to, poly(serine ester), poly(L-lactide-co-L-lysine), poly(4-hydroxy-L-proline ester), and combinations thereof. In another embodiment, the degradable polyesters may include a PEG conjugation to form a PEGylated polymer.

[0433] In one embodiment, the controlled release and/or targeted delivery formulation comprising at least one polynucleotide may comprise at least one PEG and/or PEG related polymer derivatives as described in U.S. Pat. No. 8,404,222, herein incorporated by reference in its entirety.

[0434] In another embodiment, the controlled release delivery formulation comprising at least one polynucleotide may be the controlled release polymer system described in US20130130348, herein incorporated by reference in its entirety.

[0435] In one embodiment, the polynucleotides of the present invention may be encapsulated in a therapeutic nanoparticle. Therapeutic nanoparticles may be formulated by methods described herein and known in the art such as, but not limited to, International Pub Nos. WO2010005740, WO2010030763, WO2010005721, WO2010005723, WO2012054923, US Pub. Nos. US20110262491, US20100104645, US20100087337, US20100068285, US20110274759, US20100068286, US20120288541, US20130123351 and US20130230567 and U.S. Pat. Nos. 8,206,747, 8,293,276, 8,318,208 and 8,318,211; the contents of each of which are herein incorporated by reference in their entirety. In another embodiment, therapeutic polymer nanoparticles may be identified by the methods described in US Pub No. US20120140790, herein incorporated by reference in its entirety.

[0436] In one embodiment, the therapeutic nanoparticle may be formulated for sustained release. As used herein, “sustained release” refers to a pharmaceutical composition or compound that conforms to a release rate over a specific period of time. The period of time may include, but is not limited to, hours, days, weeks, months and years. As a non-limiting example, the sustained release nanoparticle may comprise a polymer and a therapeutic agent such as, but not limited to, the polynucleotides of the present invention (see International Pub No. 2010075072 and US Pub No. US20100216804, US20110217377 and US20120201859, each of which is herein incorporated by reference in their entirety). In another non-limiting example, the sustained release formulation may comprise agents which permit persistent bioavailability such as, but not limited to, crystals, macromolecular gels and/or particulate suspensions (see US Patent Publication No US20130150295, the contents of which is herein incorporated by reference in its entirety).

[0437] In one embodiment, the therapeutic nanoparticles may be formulated to be target specific. As a non-limiting example, the therapeutic nanoparticles may include a corticosteroid (see International Pub. No. WO2011084518; herein incorporated by reference in its entirety). In one embodiment, the therapeutic nanoparticles may be formulated to be cancer specific. As a non-limiting example, the therapeutic nanoparticles may be formulated in nanoparticles described in International Pub No. WO2008121949, WO2010005726, WO2010005725, WO2011084521 and US Pub No. US20100069426, US20120004293 and US20100104655, each of which is herein incorporated by reference in their entirety.

[0438] In one embodiment, the nanoparticles of the present invention may comprise a polymeric matrix. As a non-limiting example, the nanoparticle may comprise two or more polymers such as, but not limited to, polyethylenes, polycarbonates, polyanhydrides, polyhydroxyacids, polypropylfumerates, polycaprolactones, polyamides, polyacetals, polyethers, polyesters, poly(orthoesters), polycyanoacrylates, polyvinyl alcohols, polyurethanes, polyphosphazenes, polyacrylates, polymethacrylates, polycyanoacrylates, polyureas, polystyrenes, polyamines, polylysine, poly(ethylene imine), poly(serine ester), poly(L-lactide-co-L-lysine), poly(4-hydroxy-L-proline ester) or combinations thereof.

[0439] In one embodiment, the therapeutic nanoparticle comprises a diblock copolymer. In one embodiment, the diblock copolymer may include PEG in combination with a polymer such as, but not limited to, polyethylenes, polycarbonates, polyanhydrides, polyhydroxyacids, polypropylfumerates, polycaprolactones, polyamides, polyacetals, polyethers, polyesters, poly(orthoesters), polycyanoacrylates, polyvinyl alcohols, polyurethanes, polyphosphazenes, polyacrylates, polymethacrylates, polycyanoacrylates, polyureas, polystyrenes, polyamines, polylysine, poly(ethylene imine), poly(serine ester), poly(L-lactide-co-L-lysine), poly(4-hydroxy-L-proline ester) or combinations thereof. In another embodiment, the diblock copolymer may comprise the diblock copolymers described in European Patent Publication No. the contents of which are herein incorporated by reference in its entirety. In yet another embodiment, the diblock copolymer may be a high-X diblock copolymer such as those described in International Patent Publication No. WO2013120052, the contents of which are herein incorporated by reference in its entirety.

[0440] As a non-limiting example the therapeutic nanoparticle comprises a PLGA-PEG block copolymer (see US Pub. No. US20120004293 and U.S. Pat. No. 8,236,330, each of which is herein incorporated by reference in their entirety). In another non-limiting example, the therapeutic nanoparticle is a stealth nanoparticle comprising a diblock copolymer of PEG and PLA or PEG and PLGA (see U.S. Pat. No. 8,246,968 and International Publication No. WO2012166923, the contents of each of which are herein incorporated by reference in its entirety). In yet another non-limiting example, the therapeutic nanoparticle is a stealth nanoparticle or a target-specific stealth nanoparticle as described in US Patent Publication No. US20130172406, the contents of which are herein incorporated by reference in its entirety.

[0441] In one embodiment, the therapeutic nanoparticle may comprise a multiblock copolymer (See e.g., U.S. Pat. Nos. 8,263,665 and 8,287,910 and US Patent Pub. No. US20130195987; the contents of each of which are herein incorporated by reference in its entirety).

[0442] In yet another non-limiting example, the lipid nanoparticle comprises the block copolymer PEG-PLGA-PEG (see e.g., the thermosensitive hydrogel (PEG-PLGA-PEG) was used as a TGF-beta1 gene delivery vehicle in Lee et al. Thermosensitive Hydrogel as a Tgf-β1 Gene Delivery Vehicle Enhances Diabetic Wound Healing. Pharmaceutical Research, 2003 20(12): 1995-2000; as a controlled gene delivery system in Li et al. Controlled Gene Delivery System Based on Thermosensitive Biodegradable Hydrogel. Pharmaceutical Research 2003 20(6):884-888; and Chang et al., Non-ionic amphiphilic biodegradable PEG-PLGA-PEG copolymer enhances gene delivery efficiency in rat skeletal muscle. J Controlled Release. 2007 118:245-253; each of which is herein incorporated by reference in its entirety). The polynucleotides of the present invention may be formulated in lipid nanoparticles comprising the PEG-PLGA-PEG block copolymer.

[0443] In one embodiment, the therapeutic nanoparticle may comprise a multiblock copolymer (See e.g., U.S. Pat. Nos. 8,263,665 and 8,287,910 and US Patent Pub. No. US20130195987; the contents of each of which are herein incorporated by reference in its entirety).

[0444] In one embodiment, the block copolymers described herein may be included in a polyion complex comprising a non-polymeric micelle and the block copolymer. (See e.g., U.S. Pub. No. 20120076836; herein incorporated by reference in its entirety).

[0445] In one embodiment, the therapeutic nanoparticle may comprise at least one acrylic polymer. Acrylic polymers include but are not limited to, acrylic acid, methacrylic acid, acrylic acid and methacrylic acid copolymers, methyl methacrylate copolymers, ethoxyethyl methacrylates, cyanoethyl methacrylate, amino alkyl methacrylate copolymer, poly(acrylic acid), poly(methacrylic acid), polycyanoacrylates and combinations thereof.

[0446] In one embodiment, the therapeutic nanoparticles may comprise at least one poly(vinyl ester) polymer. The poly(vinyl ester) polymer may be a copolymer such as a random copolymer. As a non-limiting example, the random copolymer may have a structure such as those described in International Application No. WO2013032829 or US Patent Publication No US20130121954, the contents of which are herein incorporated by reference in its entirety. In one aspect, the poly(vinyl ester) polymers may be conjugated to the polynucleotides described herein. In another aspect, the poly(vinyl ester) polymer which may be used in the present invention may be those described in, herein incorporated by reference in its entirety.

[0447] In one embodiment, the therapeutic nanoparticle may comprise at least one diblock copolymer. The diblock copolymer may be, but it not limited to, a poly(lactic) acid-poly(ethylene)glycol copolymer (see e.g., International Patent Publication No. WO2013044219; herein incorporated by reference in its entirety). As a non-limiting example, the therapeutic nanoparticle may be used to treat cancer (see International publication No. WO2013044219; herein incorporated by reference in its entirety).

[0448] In one embodiment, the therapeutic nanoparticles may comprise at least one cationic polymer described herein and/or known in the art.

[0449] In one embodiment, the therapeutic nanoparticles may comprise at least one amine-containing polymer such as, but not limited to polylysine, polyethylene imine, poly(amidoamine) dendrimers, poly(beta-amino esters) (See e.g., U.S. Pat. No. 8,287,849; herein incorporated by reference in its entirety) and combinations thereof.

[0450] In another embodiment, the nanoparticles described herein may comprise an amine cationic lipid such as those described in International Patent Application No. WO2013059496, the contents of which are herein incorporated by reference in its entirety. In one aspect the cationic lipids may have an amino-amine or an amino-amide moiety.

[0451] In one embodiment, the therapeutic nanoparticles may comprise at least one degradable polyester which may contain polycationic side chains. Degradable polyesters include, but are not limited to, poly(serine ester), poly(L-lactide-co-L-lysine), poly(4-hydroxy-L-proline ester), and combinations thereof. In another embodiment, the degradable polyesters may include a PEG conjugation to form a PEGylated polymer.

[0452] In another embodiment, the therapeutic nanoparticle may include a conjugation of at least one targeting ligand. The targeting ligand may be any ligand known in the art such as, but not limited to, a monoclonal antibody. (Kirpotin et al, Cancer Res. 2006 66:6732-6740; herein incorporated by reference in its entirety).

[0453] In one embodiment, the therapeutic nanoparticle may be formulated in an aqueous solution which may be used to target cancer (see International Pub No. WO2011084513 and US Pub No. US20110294717, each of which is herein incorporated by reference in their entirety).

[0454] In one embodiment, the therapeutic nanoparticle comprising at least one polynucleotide may be formulated using the methods described by Podobinski et al in U.S. Pat. No. 8,404,799, the contents of which are herein incorporated by reference in its entirety.

[0455] In one embodiment, the polynucleotides may be encapsulated in, linked to and/or associated with synthetic nanocarriers. Synthetic nanocarriers include, but are not limited to, those described in International Pub. Nos. WO2010005740, WO2010030763, WO201213501, WO2012149252, WO2012149255, WO2012149259, WO2012149265, WO2012149268, WO2012149282, WO2012149301, WO2012149393, WO2012149405, WO2012149411, WO2012149454 and WO2013019669, and US Pub. Nos. US20110262491, US20100104645, US20100087337 and US20120244222, each of which is herein incorporated by reference in their entirety. The synthetic nanocarriers may be formulated using methods known in the art and/or described herein. As a non-limiting example, the synthetic nanocarriers may be formulated by the methods described in International Pub Nos. WO2010005740, WO2010030763 and WO201213501 and US Pub. Nos. US20110262491, US20100104645, US20100087337 and US2012024422, each of which is herein incorporated by reference in their entirety. In another embodiment, the synthetic nanocarrier formulations may be lyophilized by methods described in International Pub. No. WO2011072218 and U.S. Pat. No. 8,211,473; the content of each of which is herein incorporated by reference in their entirety. In yet another embodiment, formulations of the present invention, including, but not limited to, synthetic nanocarriers, may be lyophilized or reconstituted by the methods described in US Patent Publication No. US20130230568, the contents of which are herein incorporated by reference in its entirety.

[0456] In one embodiment, the synthetic nanocarriers may contain reactive groups to release the polynucleotides described herein (see International Pub. No. WO20120952552 and US Pub No. US20120171229, each of which is herein incorporated by reference in their entirety).

[0457] In one embodiment, the synthetic nanocarriers may contain an immunostimulatory agent to enhance the immune response from delivery of the synthetic nanocarrier. As a non-limiting example, the synthetic nanocarrier may comprise a Th1 immunostimulatory agent which may enhance a Th1-based response of the immune system (see International Pub No. WO2010123569 and US Pub. No. US20110223201, each of which is herein incorporated by reference in its entirety).

[0458] In one embodiment, the synthetic nanocarriers may be formulated for targeted release. In one embodiment, the synthetic nanocarrier is formulated to release the polynucleotides at a specified pH and/or after a desired time interval. As a non-limiting example, the synthetic nanoparticle may be formulated to release the polynucleotides after 24 hours and/or at a pH of 4.5 (see International Pub. Nos. WO2010138193 and WO2010138194 and US Pub Nos. US20110020388 and US20110027217, each of which is herein incorporated by reference in their entireties).

[0459] In one embodiment, the synthetic nanocarriers may be formulated for controlled and/or sustained release of the polynucleotides described herein. As a non-limiting example, the synthetic nanocarriers for sustained release may be formulated by methods known in the art, described herein and/or as described in International Pub No. WO2010138192 and US Pub No. 20100303850, each of which is herein incorporated by reference in their entirety.

[0460] In one embodiment, the polynucleotides may be formulated for controlled and/or sustained release wherein the formulation comprises at least one polymer that is a crystalline side chain (CYSC) polymer. CYSC polymers are described in U.S. Pat. No. 8,399,007, herein incorporated by reference in its entirety.

[0461] In one embodiment, the synthetic nanocarrier may be formulated for use as a vaccine. In one embodiment, the synthetic nanocarrier may encapsulate at least one polynucleotide which encode at least one antigen. As a non-limiting example, the synthetic nanocarrier may include at least one antigen and an excipient for a vaccine dosage form (see International Pub No. WO2011150264 and US Pub No. US20110293723, each of which is herein incorporated by reference in their entirety). As another non-limiting example, a vaccine dosage form may include at least two synthetic nanocarriers with the same or different antigens and an excipient (see International Pub No. WO2011150249 and US Pub No. US20110293701, each of which is herein incorporated by reference in their entirety). The vaccine dosage form may be selected by methods described herein, known in the art and/or described in International Pub No. WO2011150258 and US Pub No. US20120027806, each of which is herein incorporated by reference in their entirety).

[0462] In one embodiment, the synthetic nanocarrier may comprise at least one polynucleotide which encodes at least one adjuvant. As non-limiting example, the adjuvant may comprise dimethyldioctadecylammonium-bromide, dimethyldioctadecylammonium-chloride, dimethyldioctadecylammonium-phosphate or dimethyldioctadecylammonium-acetate (DDA) and an apolar fraction or part of said apolar fraction of a total lipid extract of a mycobacterium (See e.g., U.S. Pat. No. 8,241,610; herein incorporated by reference in its entirety). In another embodiment, the synthetic nanocarrier may comprise at least one polynucleotide and an adjuvant. As a non-limiting example, the synthetic nanocarrier comprising and adjuvant may be formulated by the methods described in International Pub No. WO2011150240 and US Pub No. US20110293700, each of which is herein incorporated by reference in its entirety.

[0463] In one embodiment, the synthetic nanocarrier may encapsulate at least one polynucleotide which encodes a peptide, fragment or region from a virus. As a non-limiting example, the synthetic nanocarrier may include, but is not limited to, the nanocarriers described in International Pub No. WO2012024621, WO201202629, WO2012024632 and US Pub No. US20120064110, US20120058153 and US20120058154, each of which is herein incorporated by reference in their entirety.

[0464] In one embodiment, the synthetic nanocarrier may be coupled to a polynucleotide which may be able to trigger a humoral and/or cytotoxic T lymphocyte (CTL) response (See e.g., International Publication No. WO2013019669, herein incorporated by reference in its entirety).

[0465] In one embodiment, the polynucleotides may be encapsulated in, linked to and/or associated with zwitterionic lipids. Non-limiting examples of zwitterionic lipids and methods of using zwitterionic lipids are described in US Patent Publication No. US20130216607, the contents of which are herein incorporated by reference in its entirety. In one aspect, the zwitterionic lipids may be used in the liposomes and lipid nanoparticles described herein.

[0466] In one embodiment, the polynucleotides may be formulated in colloid nanocarriers as described in US Patent Publication No. US20130197100, the contents of which are herein incorporated by reference in its entirety.

[0467] In one embodiment, the nanoparticle may be optimized for oral administration. The nanoparticle may comprise at least one cationic biopolymer such as, but not limited to, chitosan or a derivative thereof. As a non-limiting example, the nanoparticle may be formulated by the methods described in U.S. Pub. No. 20120282343; herein incorporated by reference in its entirety.

[0468] In some embodiments, LNPs comprise the lipid KL52 (an amino-lipid disclosed in U.S. Application Publication No. 2012/0295832 expressly incorporated herein by reference in its entirety). Activity and/or safety (as measured by examining one or more of ALT/AST, white blood cell count and cytokine induction) of LNP administration may be improved by incorporation of such lipids. LNPs comprising KL52 may be administered intravenously and/or in one or more doses. In some embodiments, administration of LNPs comprising KL52 results in equal or improved mRNA and/or protein expression as compared to LNPs comprising MC3.

[0469] In some embodiments, polynucleotides may be delivered using smaller LNPs. Such particles may comprise a diameter from below 0.1 um up to 100 nm such as, but not limited to, less than 0.1 um, less than 1.0 um, less than 5 um, less than 10 um, less than 15 um, less than 20 um, less than 25 um, less than 30 um, less than 35 um, less than 40 um, less than 50 um, less than 55 um, less than 60 um, less than 65 um, less than 70 um, less than 75 um, less than 80 um, less than 85 um, less than 90 um, less than 95 um, less than 100 um, less than 125 um, less than 150 um, less than 175 um, less than 200 um, less than 225 um, less than 250 um, less than 275 um, less than 300 um, less than 325 um, less than 350 um, less than 375 um, less than 400 um, less than 425 um, less than 450 um, less than 475 um, less than 500 um, less than 525 um, less than 550 um, less than 575 um, less than 600 um, less than 625 um, less than 650 um, less than 675 um, less than 700 um, less than 725 um, less than 750 um, less than 775 um, less than 800 um, less than 825 um, less than 850 um, less than 875 um, less than 900 um, less than 925 um, less than 950 um, less than 975 um,

[0470] In another embodiment, polynucleotides may be delivered using smaller LNPs which may comprise a diameter from about 1 nm to about 100 nm, from about 1 nm to about 10 nm, about 1 nm to about 20 nm, from about 1 nm to about 30 nm, from about 1 nm to about 40 nm, from about 1 nm to about 50 nm, from about 1 nm to about 60 nm, from about 1 nm to about 70 nm, from about 1 nm to about 80 nm, from about 1 nm to about 90 nm, from about 5 nm to about from 100 nm, from about 5 nm to about 10 nm, about 5 nm to about 20 nm, from about 5 nm to about 30 nm, from about 5 nm to about 40 nm, from about 5 nm to about 50 nm, from about 5 nm to about 60 nm, from about 5 nm to about 70 nm, from about 5 nm to about 80 nm, from about 5 nm to about 90 nm, about 10 to about 50 nM, from about 20 to about 50 nm, from about 30 to about 50 nm, from about 40 to about 50 nm, from about 20 to about 60 nm, from about 30 to about 60 nm, from about 40 to about 60 nm, from about 20 to about 70 nm, from about 30 to about 70 nm, from about 40 to about 70 nm, from about 50 to about 70 nm, from about 60 to about 70 nm, from about 20 to about 80 nm, from about 30 to about 80 nm, from about 40 to about 80 nm, from about 50 to about 80 nm, from about 60 to about 80 nm, from about 20 to about 90 nm, from about 30 to about 90 nm, from about 40 to about 90 nm, from about 50 to about 90 nm, from about 60 to about 90 nm and/or from about 70 to about 90 nm.

[0471] In some embodiments, such LNPs are synthesized using methods comprising microfluidic mixers. Exemplary microfluidic mixers may include, but are not limited to a slit interdigital micromixer including, but not limited to those manufactured by Microinnova (Allerheiligen bei Wildon, Austria) and/or a staggered herringbone micromixer (SHM) (Zhigaltsev, I. V. et al., Bottom-up design and synthesis of limit size lipid nanoparticle systems with aqueous and triglyceride cores using millisecond microfluidic mixing have been published (Langmuir. 2012. 28:3633-40; Belliveau, N. M. et al., Microfluidic synthesis of highly potent limit-size lipid nanoparticles for in vivo delivery of siRNA. Molecular Therapy-Nucleic Acids. 2012. 1:e37; Chen, D. et al., Rapid discovery of potent siRNA-containing lipid nanoparticles enabled by controlled microfluidic formulation. J Am Chem Soc. 2012. 134(16):6948-51; each of which is herein incorporated by reference in its entirety). In some embodiments, methods of LNP generation comprising SHM, further comprise the mixing of at least two input streams wherein mixing occurs by microstructure-induced chaotic advection (MICA). According to this method, fluid streams flow through channels present in a herringbone pattern causing rotational flow and folding the fluids around each other. This method may also comprise a surface for fluid mixing wherein the surface changes orientations during fluid cycling. Methods of generating LNPs using SHM include those disclosed in U.S. Application Publication Nos. 2004/0262223 and 2012/0276209, each of which is expressly incorporated herein by reference in their entirety.

[0472] In one embodiment, the polynucleotides of the present invention may be formulated in lipid nanoparticles created using a micromixer such as, but not limited to, a Slit Interdigital Microstructured Mixer (SIMM-V2) or a Standard Slit Interdigital Micro Mixer (SSIMM) or Caterpillar (CPMM) or Impinging jet (IJMM) from the Institut für Mikrotechnik Mainz GmbH, Mainz Germany).

[0473] In one embodiment, the polynucleotides of the present invention may be formulated in lipid nanoparticles created using microfluidic technology (see Whitesides, George M. The Origins and the Future of Microfluidics. Nature, 2006 442: 368-373; and Abraham et al. Chaotic Mixer for Microchannels. Science, 2002 295: 647-651; each of which is herein incorporated by reference in its entirety). As a non-limiting example, controlled microfluidic formulation includes a passive method for mixing streams of steady pressure-driven flows in micro channels at a low Reynolds number (See e.g., Abraham et al. Chaotic Mixer for Microchannels. Science, 2002 295: 647-651; which is herein incorporated by reference in its entirety).

[0474] In one embodiment, the polynucleotides of the present invention may be formulated in lipid nanoparticles created using a micromixer chip such as, but not limited to, those from Harvard Apparatus (Holliston, Mass.) or Dolomite Microfluidics (Royston, UK). A micromixer chip can be used for rapid mixing of two or more fluid streams with a split and recombine mechanism.

[0475] In one embodiment, the polynucleotides of the invention may be formulated for delivery using the drug encapsulating microspheres described in International Patent Publication No. WO2013063468 or U.S. Pat. No. 8,440,614, each of which is herein incorporated by reference in its entirety. The microspheres may comprise a compound of the formula (I), (II), (III), (IV), (V) or (VI) as described in International patent application WO2013063468, the contents of which are herein incorporated by reference in its entirety. In another aspect, the amino acid, peptide, polypeptide, lipids (ADPL) are useful in delivering the polynucleotides of the invention to cells (see International Patent Publication No. WO2013063468, herein incorporated by reference in its entirety).

[0476] In one embodiment, the polynucleotides of the invention may be formulated in lipid nanoparticles having a diameter from about 10 to about 100 nm such as, but not limited to, about 10 to about 20 nm, about 10 to about 30 nm, about 10 to about 40 nm, about 10 to about 50 nm, about 10 to about 60 nm, about 10 to about 70 nm, about 10 to about 80 nm, about 10 to about 90 nm, about 20 to about 30 nm, about 20 to about 40 nm, about 20 to about 50 nm, about 20 to about 60 nm, about 20 to about 70 nm, about 20 to about 80 nm, about 20 to about 90 nm, about 20 to about 100 nm, about 30 to about 40 nm, about 30 to about 50 nm, about 30 to about 60 nm, about 30 to about 70 nm, about 30 to about 80 nm, about 30 to about 90 nm, about 30 to about 100 nm, about 40 to about 50 nm, about 40 to about 60 nm, about 40 to about 70 nm, about 40 to about 80 nm, about 40 to about 90 nm, about 40 to about 100 nm, about 50 to about 60 nm, about 50 to about 70 nm about 50 to about 80 nm, about 50 to about 90 nm, about 50 to about 100 nm, about 60 to about 70 nm, about 60 to about 80 nm, about 60 to about 90 nm, about 60 to about 100 nm, about 70 to about 80 nm, about 70 to about 90 nm, about 70 to about 100 nm, about 80 to about 90 nm, about 80 to about 100 nm and/or about 90 to about 100 nm.

[0477] In one embodiment, the lipid nanoparticles may have a diameter from about 10 to 500 nm.

[0478] In one embodiment, the lipid nanoparticle may have a diameter greater than 100 nm, greater than 150 nm, greater than 200 nm, greater than 250 nm, greater than 300 nm, greater than 350 nm, greater than 400 nm, greater than 450 nm, greater than 500 nm, greater than 550 nm, greater than 600 nm, greater than 650 nm, greater than 700 nm, greater than 750 nm, greater than 800 nm, greater than 850 nm, greater than 900 nm, greater than 950 nm or greater than 1000 nm.

[0479] In one aspect, the lipid nanoparticle may be a limit size lipid nanoparticle described in International Patent Publication No. WO2013059922, the contents of which are herein incorporated by reference in its entirety. The limit size lipid nanoparticle may comprise a lipid bilayer surrounding an aqueous core or a hydrophobic core; where the lipid bilayer may comprise a phospholipid such as, but not limited to, diacylphosphatidylcholine, a diacylphosphatidylethanolamine, a ceramide, a sphingomyelin, a dihydrosphingomyelin, a cephalin, a cerebroside, a C8-C20 fatty acid diacylphophatidylcholine, and 1-palmitoyl-2-oleoyl phosphatidylcholine (POPC). In another aspect the limit size lipid nanoparticle may comprise a polyethylene glycol-lipid such as, but not limited to, DLPE-PEG, DMPE-PEG, DPPC-PEG and DSPE-PEG.

[0480] In one embodiment, the polynucleotides may be delivered, localized and/or concentrated in a specific location using the delivery methods described in International Patent Publication No. WO2013063530, the contents of which are herein incorporated by reference in its entirety. As a non-limiting example, a subject may be administered an empty polymeric particle prior to, simultaneously with or after delivering the polynucleotides to the subject. The empty polymeric particle undergoes a change in volume once in contact with the subject and becomes lodged, embedded, immobilized or entrapped at a specific location in the subject.

[0481] In one embodiment, the polynucleotides may be formulated in an active substance release system (See e.g., US Patent Publication No. US20130102545, herein incorporated by reference in its entirety). The active substance release system may comprise 1) at least one nanoparticle bonded to an oligonucleotide inhibitor strand which is hybridized with a catalytically active nucleic acid and 2) a compound bonded to at least one substrate molecule bonded to a therapeutically active substance (e.g., polynucleotides described herein), where the therapeutically active substance is released by the cleavage of the substrate molecule by the catalytically active nucleic acid.

[0482] In one embodiment, the polynucleotides may be formulated in a nanoparticle comprising an inner core comprising a non-cellular material and an outer surface comprising a cellular membrane. The cellular membrane may be derived from a cell or a membrane derived from a virus. As a non-limiting example, the nanoparticle may be made by the methods described in International Patent Publication No. WO2013052167, herein incorporated by reference in its entirety. As another non-limiting example, the nanoparticle described in International Patent Publication No. WO2013052167, herein incorporated by reference in its entirety, may be used to deliver the polynucleotides described herein.

[0483] In one embodiment, the polynucleotides may be formulated in porous nanoparticle-supported lipid bilayers (protocells). Protocells are described in International Patent Publication No. WO2013056132, the contents of which are herein incorporated by reference in its entirety.

[0484] In one embodiment, the polynucleotides described herein may be formulated in polymeric nanoparticles as described in or made by the methods described in U.S. Pat. Nos. 8,420,123 and 8,518,963 and European Patent No. EP2073848B1, the contents of each of which are herein incorporated by reference in their entirety. As a non-limiting example, the polymeric nanoparticle may have a high glass transition temperature such as the nanoparticles described in or nanoparticles made by the methods described in U.S. Pat. No. 8,518,963, the contents of which are herein incorporated by reference in its entirety. As another non-limiting example, the polymer nanoparticle for oral, parenteral and topical formulations may be made by the methods described in European Patent No. EP2073848B1, the contents of which are herein incorporated by reference in its entirety.

[0485] In another embodiment, the polynucleotides described herein may be formulated in nanoparticles used in imaging. The nanoparticles may be liposome nanoparticles such as those described in US Patent Publication No US20130129636, herein incorporated by reference in its entirety. As a non-limiting example, the liposome may comprise gadolinium(III)2-{4,7-bis-carboxymethyl-10-[(N,N-distearylamidomethyl-N′-amido-methyl]-1,4,7,10-tetra-azacyclododec-1-yl}-acetic acid and a neutral, fully saturated phospholipid component (see e.g., US Patent Publication No US20130129636, the contents of which is herein incorporated by reference in its entirety).

[0486] In one embodiment, the nanoparticles which may be used in the present invention are formed by the methods described in U.S. Patent Application No. US20130130348, the contents of which is herein incorporated by reference in its entirety.

[0487] The nanoparticles of the present invention may further include nutrients such as, but not limited to, those which deficiencies can lead to health hazards from anemia to neural tube defects (see e.g., the nanoparticles described in International Patent Publication No WO2013072929, the contents of which is herein incorporated by reference in its entirety). As a non-limiting example, the nutrient may be iron in the form of ferrous, ferric salts or elemental iron, iodine, folic acid, vitamins or micronutrients.

[0488] In one embodiment, the polynucleotides of the present invention may be formulated in a swellable nanoparticle. The swellable nanoparticle may be, but is not limited to, those described in U.S. Pat. No. 8,440,231, the contents of which is herein incorporated by reference in its entirety. As a non-limiting embodiment, the swellable nanoparticle may be used for delivery of the polynucleotides of the present invention to the pulmonary system (see e.g., U.S. Pat. No. 8,440,231, the contents of which is herein incorporated by reference in its entirety).

[0489] The polynucleotides of the present invention may be formulated in polyanhydride nanoparticles such as, but not limited to, those described in U.S. Pat. No. 8,449,916, the contents of which is herein incorporated by reference in its entirety.

[0490] The nanoparticles and microparticles of the present invention may be geometrically engineered to modulate macrophage and/or the immune response. In one aspect, the geometrically engineered particles may have varied shapes, sizes and/or surface charges in order to incorporated the polynucleotides of the present invention for targeted delivery such as, but not limited to, pulmonary delivery (see e.g., International Publication No WO2013082111, the contents of which is herein incorporated by reference in its entirety). Other physical features the geometrically engineering particles may have include, but are not limited to, fenestrations, angled arms, asymmetry and surface roughness, charge which can alter the interactions with cells and tissues. As a non-limiting example, nanoparticles of the present invention may be made by the methods described in International Publication No WO2013082111, the contents of which is herein incorporated by reference in its entirety.

[0491] In one embodiment, the nanoparticles of the present invention may be water soluble nanoparticles such as, but not limited to, those described in International Publication No. WO2013090601, the contents of which is herein incorporated by reference in its entirety. The nanoparticles may be inorganic nanoparticles which have a compact and zwitterionic ligand in order to exhibit good water solubility. The nanoparticles may also have small hydrodynamic diameters (HD), stability with respect to time, pH, and salinity and a low level of non-specific protein binding.

[0492] In one embodiment the nanoparticles of the present invention may be developed by the methods described in US Patent Publication No. US20130172406, the contents of which are herein incorporated by reference in its entirety.

[0493] In one embodiment, the nanoparticles of the present invention are stealth nanoparticles or target-specific stealth nanoparticles such as, but not limited to, those described in US Patent Publication No. US20130172406; the contents of which is herein incorporated by reference in its entirety. The nanoparticles of the present invention may be made by the methods described in US Patent Publication No. US20130172406, the contents of which are herein incorporated by reference in its entirety.

[0494] In another embodiment, the stealth or target-specific stealth nanoparticles may comprise a polymeric matrix. The polymeric matrix may comprise two or more polymers such as, but not limited to, polyethylenes, polycarbonates, polyanhydrides, polyhydroxyacids, polypropylfumerates, polycaprolactones, polyamides, polyacetals, polyethers, polyesters, poly(orthoesters), polycyanoacrylates, polyvinyl alcohols, polyurethanes, polyphosphazenes, polyacrylates, polymethacrylates, polycyanoacrylates, polyureas, polystyrenes, polyamines, polyesters, polyanhydrides, polyethers, polyurethanes, polymethacrylates, polyacrylates, polycyanoacrylates or combinations thereof.

[0495] In one embodiment, the nanoparticle may be a nanoparticle-nucleic acid hybrid structure having a high density nucleic acid layer. As a non-limiting example, the nanoparticle-nucleic acid hybrid structure may made by the methods described in US Patent Publication No. US20130171646, the contents of which are herein incorporated by reference in its entirety. The nanoparticle may comprise a nucleic acid such as, but not limited to, polynucleotides described herein and/or known in the art.

[0496] At least one of the nanoparticles of the present invention may be embedded in in the core a nanostructure or coated with a low density porous 3-D structure or coating which is capable of carrying or associating with at least one payload within or on the surface of the nanostructure. Non-limiting examples of the nanostructures comprising at least one nanoparticle are described in International Patent Publication No. WO2013123523, the contents of which are herein incorporated by reference in its entirety.

### Polymers, Biodegradable Nanoparticles, and Core-Shell Nanoparticles

[0497] The polynucleotides of the invention can be formulated using natural and/or synthetic polymers. Non-limiting examples of polymers which may be used for delivery include, but are not limited to, DYNAMIC POLYCONJUGATE® (Arrowhead Research Corp., Pasadena, Calif.) formulations from MIRUS® Bio (Madison, Wis.) and Roche Madison (Madison, Wis.), PHASERX™ polymer formulations such as, without limitation, SMARTT POLYMER TECHNOLOGY™ (PHASERX®, Seattle, Wash.), DMRI/DOPE, poloxamer, VAXFECTIN® adjuvant from Vical (San Diego, Calif.), chitosan, cyclodextrin from Calando Pharmaceuticals (Pasadena, Calif.), dendrimers and poly(lactic-co-glycolic acid) (PLGA) polymers. RONDEL™ (RNAi/Oligonucleotide Nanoparticle Delivery) polymers (Arrowhead Research Corporation, Pasadena, Calif.) and pH responsive co-block polymers such as, but not limited to, PHASERX® (Seattle, Wash.).

[0498] A non-limiting example of chitosan formulation includes a core of positively charged chitosan and an outer portion of negatively charged substrate (U.S. Pub. No. 20120258176; herein incorporated by reference in its entirety). Chitosan includes, but is not limited to N-trimethyl chitosan, mono-N-carboxymethyl chitosan (MCC), N-palmitoyl chitosan (NPCS), EDTA-chitosan, low molecular weight chitosan, chitosan derivatives, or combinations thereof.

[0499] In one embodiment, the polymers used in the present invention have undergone processing to reduce and/or inhibit the attachment of unwanted substances such as, but not limited to, bacteria, to the surface of the polymer. The polymer may be processed by methods known and/or described in the art and/or described in International Pub. No. WO2012150467, herein incorporated by reference in its entirety.

[0500] A non-limiting example of PLGA formulations include, but are not limited to, PLGA injectable depots (e.g., ELIGARD® which is formed by dissolving PLGA in 66% N-methyl-2-pyrrolidone (NMP) and the remainder being aqueous solvent and leuprolide. Once injected, the PLGA and leuprolide peptide precipitates into the subcutaneous space).

[0501] Many of these polymer approaches have demonstrated efficacy in delivering oligonucleotides in vivo into the cell cytoplasm (reviewed in deFougerolles Hum Gene Ther. 2008 19:125-132; herein incorporated by reference in its entirety). Two polymer approaches that have yielded robust in vivo delivery of nucleic acids, in this case with small interfering RNA (siRNA), are dynamic polyconjugates and cyclodextrin-based nanoparticles (see e.g., US Patent Publication No. US20130156721, herein incorporated by reference in its entirety). The first of these delivery approaches uses dynamic polyconjugates and has been shown in vivo in mice to effectively deliver siRNA and silence endogenous target mRNA in hepatocytes (Rozema et al., Proc Natl Acad Sci USA. 2007 104:12982-12887; herein incorporated by reference in its entirety). This particular approach is a multicomponent polymer system whose key features include a membrane-active polymer to which nucleic acid, in this case siRNA, is covalently coupled via a disulfide bond and where both PEG (for charge masking) and N-acetylgalactosamine (for hepatocyte targeting) groups are linked via pH-sensitive bonds (Rozema et al., Proc Natl Acad Sci USA. 2007 104:12982-12887; herein incorporated by reference in its entirety). On binding to the hepatocyte and entry into the endosome, the polymer complex disassembles in the low-pH environment, with the polymer exposing its positive charge, leading to endosomal escape and cytoplasmic release of the siRNA from the polymer. Through replacement of the N-acetylgalactosamine group with a mannose group, it was shown one could alter targeting from asialoglycoprotein receptor-expressing hepatocytes to sinusoidal endothelium and Kupffer cells. Another polymer approach involves using transferrin-targeted cyclodextrin-containing polycation nanoparticles. These nanoparticles have demonstrated targeted silencing of the EWS-FLI1 gene product in transferrin receptor-expressing Ewing's sarcoma tumor cells (Hu-Lieskovan et al., Cancer Res. 2005 65: 8984-8982; herein incorporated by reference in its entirety) and siRNA formulated in these nanoparticles was well tolerated in non-human primates (Heidel et al., Proc Natl Acad Sci USA 2007 104:5715-21; herein incorporated by reference in its entirety). Both of these delivery strategies incorporate rational approaches using both targeted delivery and endosomal escape mechanisms.

[0502] The polymer formulation can permit the sustained or delayed release of polynucleotides (e.g., following intramuscular or subcutaneous injection). The altered release profile for the polynucleotide can result in, for example, translation of an encoded protein over an extended period of time. The polymer formulation may also be used to increase the stability of the polynucleotide. Biodegradable polymers have been previously used to protect nucleic acids other than polynucleotide from degradation and been shown to result in sustained release of payloads in vivo (Rozema et al., Proc Natl Acad Sci USA. 2007 104:12982-12887; Sullivan et al., Expert Opin Drug Deliv. 2010 7:1433-1446; Convertine et al., Biomacromolecules. 2010 Oct. 1; Chu et al., Acc Chem Res. 2012 Jan. 13; Manganiello et al., Biomaterials. 2012 33:2301-2309; Benoit et al., Biomacromolecules. 2011 12:2708-2714; Singha et al., Nucleic Acid Ther. 2011 2:133-147; deFougerolles Hum Gene Ther. 2008 19:125-132; Schaffert and Wagner, Gene Ther. 2008 16:1131-1138; Chaturvedi et al., Expert Opin Drug Deliv. 2011 8:1455-1468; Davis, Mol Pharm. 2009 6:659-668; Davis, Nature 2010 464:1067-1070; each of which is herein incorporated by reference in its entirety).

[0503] In one embodiment, the pharmaceutical compositions may be sustained release formulations. In a further embodiment, the sustained release formulations may be for subcutaneous delivery. Sustained release formulations may include, but are not limited to, PLGA microspheres, ethylene vinyl acetate (EVAc), poloxamer, GELSITE® (Nanotherapeutics, Inc. Alachua, Fla.), HYLENEX® (Halozyme Therapeutics, San Diego Calif.), surgical sealants such as fibrinogen polymers (Ethicon Inc. Cornelia, Ga.), TISSELL® (Baxter International, Inc Deerfield, Ill.), PEG-based sealants, and COSEAL® (Baxter International, Inc Deerfield, Ill.).

[0504] As a non-limiting example modified mRNA may be formulated in PLGA microspheres by preparing the PLGA microspheres with tunable release rates (e.g., days and weeks) and encapsulating the modified mRNA in the PLGA microspheres while maintaining the integrity of the modified mRNA during the encapsulation process. EVAc are non-biodegradeable, biocompatible polymers which are used extensively in pre-clinical sustained release implant applications (e.g., extended release products Ocusert a pilocarpine ophthalmic insert for glaucoma or progestasert a sustained release progesterone intrauterine device; transdermal delivery systems Testoderm, Duragesic and Selegiline; catheters). Poloxamer F-407 NF is a hydrophilic, non-ionic surfactant triblock copolymer of polyoxyethylene-polyoxypropylene-polyoxyethylene having a low viscosity at temperatures less than 5° C. and forms a solid gel at temperatures greater than 15° C. PEG-based surgical sealants comprise two synthetic PEG components mixed in a delivery device which can be prepared in one minute, seals in 3 minutes and is reabsorbed within 30 days. GELSITE® and natural polymers are capable of in-situ gelation at the site of administration. They have been shown to interact with protein and peptide therapeutic candidates through ionic interaction to provide a stabilizing effect.

[0505] Polymer formulations can also be selectively targeted through expression of different ligands as exemplified by, but not limited by, folate, transferrin, and N-acetylgalactosamine (GalNAc) (Benoit et al., Biomacromolecules. 2011 12:2708-2714; Rozema et al., Proc Natl Acad Sci USA. 2007 104:12982-12887; Davis, Mol Pharm. 2009 6:659-668; Davis, Nature 2010 464:1067-1070; each of which is herein incorporated by reference in its entirety).

[0506] The polynucleotides of the invention may be formulated with or in a polymeric compound. The polymer may include at least one polymer such as, but not limited to, polyethenes, polyethylene glycol (PEG), poly(l-lysine)(PLL), PEG grafted to PLL, cationic lipopolymer, biodegradable cationic lipopolymer, polyethylenimine (PEI), cross-linked branched poly(alkylene imines), a polyamine derivative, a modified poloxamer, a biodegradable polymer, elastic biodegradable polymer, biodegradable block copolymer, biodegradable random copolymer, biodegradable polyester copolymer, biodegradable polyester block copolymer, biodegradable polyester block random copolymer, multiblock copolymers, linear biodegradable copolymer, poly[α-(4-aminobutyl)-L-glycolic acid) (PAGA), biodegradable cross-linked cationic multi-block copolymers, polycarbonates, polyanhydrides, polyhydroxyacids, polypropylfumerates, polycaprolactones, polyamides, polyacetals, polyethers, polyesters, poly(orthoesters), polycyanoacrylates, polyvinyl alcohols, polyurethanes, polyphosphazenes, polyacrylates, polymethacrylates, polycyanoacrylates, polyureas, polystyrenes, polyamines, polylysine, poly(ethylene imine), poly(serine ester), poly(L-lactide-co-L-lysine), poly(4-hydroxy-L-proline ester), acrylic polymers, amine-containing polymers, dextran polymers, dextran polymer derivatives or combinations thereof.

[0507] As a non-limiting example, the polynucleotides of the invention may be formulated with the polymeric compound of PEG grafted with PLL as described in U.S. Pat. No. 6,177,274; herein incorporated by reference in its entirety. The formulation may be used for transfecting cells in vitro or for in vivo delivery of polynucleotide. In another example, the polynucleotide may be suspended in a solution or medium with a cationic polymer, in a dry pharmaceutical composition or in a solution that is capable of being dried as described in U.S. Pub. Nos. 20090042829 and 20090042825; each of which are herein incorporated by reference in their entireties.

[0508] As another non-limiting example the polynucleotides of the invention may be formulated with a PLGA-PEG block copolymer (see US Pub. No. US20120004293 and U.S. Pat. No. 8,236,330, herein incorporated by reference in their entireties) or PLGA-PEG-PLGA block copolymers (See U.S. Pat. No. 6,004,573, herein incorporated by reference in its entirety). As a non-limiting example, the polynucleotides of the invention may be formulated with a diblock copolymer of PEG and PLA or PEG and PLGA (see U.S. Pat. No. 8,246,968, herein incorporated by reference in its entirety).

[0509] A polyamine derivative may be used to deliver nucleic acids or to treat and/or prevent a disease or to be included in an implantable or injectable device (U.S. Pub. No. 20100260817 (now U.S. Pat. No. 8,460,696) the contents of each of which is herein incorporated by reference in its entirety). As a non-limiting example, a pharmaceutical composition may include the polynucleotide and the polyamine derivative described in U.S. Pub. No. 20100260817 (now U.S. Pat. No. 8,460,696; the contents of which are incorporated herein by reference in its entirety. As a non-limiting example the polynucleotides of the present invention may be delivered using a polyaminde polymer such as, but not limited to, a polymer comprising a 1,3-dipolar addition polymer prepared by combining a carbohydrate diazide monomer with a dilkyne unite comprising oligoamines (U.S. Pat. No. 8,236,280; herein incorporated by reference in its entirety).

[0510] The polynucleotides of the invention may be formulated with at least one acrylic polymer. Acrylic polymers include but are not limited to, acrylic acid, methacrylic acid, acrylic acid and methacrylic acid copolymers, methyl methacrylate copolymers, ethoxyethyl methacrylates, cyanoethyl methacrylate, amino alkyl methacrylate copolymer, poly(acrylic acid), poly(methacrylic acid), polycyanoacrylates and combinations thereof.

[0511] In one embodiment, the polynucleotides of the present invention may be formulated with at least one polymer and/or derivatives thereof described in International Publication Nos. WO2011115862, WO2012082574 and WO2012068187 and U.S. Pub. No. 20120283427, each of which are herein incorporated by reference in their entireties. In another embodiment, the polynucleotides of the present invention may be formulated with a polymer of formula Z as described in WO2011115862, herein incorporated by reference in its entirety. In yet another embodiment, the polynucleotides may be formulated with a polymer of formula Z, Z′ or Z″ as described in International Pub. Nos. WO2012082574 or WO2012068187 and U.S. Pub. No. 2012028342, each of which are herein incorporated by reference in their entireties. The polymers formulated with the modified RNA of the present invention may be synthesized by the methods described in International Pub. Nos. WO2012082574 or WO2012068187, each of which are herein incorporated by reference in their entireties.

[0512] The polynucleotides of the invention may be formulated with at least one acrylic polymer. Acrylic polymers include but are not limited to, acrylic acid, methacrylic acid, acrylic acid and methacrylic acid copolymers, methyl methacrylate copolymers, ethoxyethyl methacrylates, cyanoethyl methacrylate, amino alkyl methacrylate copolymer, poly(acrylic acid), poly(methacrylic acid), polycyanoacrylates and combinations thereof.

[0513] Formulations of polynucleotides of the invention may include at least one amine-containing polymer such as, but not limited to polylysine, polyethylene imine, poly(amidoamine) dendrimers, poly(amine-co-esters) or combinations thereof. As a non-limiting example, the poly(amine-co-esters) may be the polymers described in and/or made by the methods described in International Publication No WO2013082529, the contents of which are herein incorporated by reference in its entirety.

[0514] For example, the polynucleotides of the invention may be formulated in a pharmaceutical compound including a poly(alkylene imine), a biodegradable cationic lipopolymer, a biodegradable block copolymer, a biodegradable polymer, or a biodegradable random copolymer, a biodegradable polyester block copolymer, a biodegradable polyester polymer, a biodegradable polyester random copolymer, a linear biodegradable copolymer, PAGA, a biodegradable cross-linked cationic multi-block copolymer or combinations thereof. The biodegradable cationic lipopolymer may be made by methods known in the art and/or described in U.S. Pat. No. 6,696,038, U.S. App. Nos. 20030073619 and 20040142474 each of which is herein incorporated by reference in their entireties. The poly(alkylene imine) may be made using methods known in the art and/or as described in U.S. Pub. No. 20100004315, herein incorporated by reference in its entirety. The biodegradable polymer, biodegradable block copolymer, the biodegradable random copolymer, biodegradable polyester block copolymer, biodegradable polyester polymer, or biodegradable polyester random copolymer may be made using methods known in the art and/or as described in U.S. Pat. Nos. 6,517,869 and 6,267,987, the contents of which are each incorporated herein by reference in their entirety. The linear biodegradable copolymer may be made using methods known in the art and/or as described in U.S. Pat. No. 6,652,886. The PAGA polymer may be made using methods known in the art and/or as described in U.S. Pat. No. 6,217,912 herein incorporated by reference in its entirety. The PAGA polymer may be copolymerized to form a copolymer or block copolymer with polymers such as but not limited to, poly-L-lysine, polyargine, polyornithine, histones, avidin, protamines, polylactides and poly(lactide-co-glycolides). The biodegradable cross-linked cationic multi-block copolymers may be made my methods known in the art and/or as described in U.S. Pat. Nos. 8,057,821, 8,444,992 or U.S. Pub. No. 2012009145 each of which are herein incorporated by reference in their entireties. For example, the multi-block copolymers may be synthesized using linear polyethyleneimine (LPEI) blocks which have distinct patterns as compared to branched polyethyeneimines. Further, the composition or pharmaceutical composition may be made by the methods known in the art, described herein, or as described in U.S. Pub. No. 20100004315 or U.S. Pat. Nos. 6,267,987 and 6,217,912 each of which are herein incorporated by reference in their entireties.

[0515] The polynucleotides of the invention may be formulated with at least one degradable polyester which may contain polycationic side chains. Degradable polyesters include, but are not limited to, poly(serine ester), poly(L-lactide-co-L-lysine), poly(4-hydroxy-L-proline ester), and combinations thereof. In another embodiment, the degradable polyesters may include a PEG conjugation to form a PEGylated polymer.

[0516] The polynucleotides of the invention may be formulated with at least one crosslinkable polyester. Crosslinkable polyesters include those known in the art and described in US Pub. No. 20120269761, the contents of which is herein incorporated by reference in its entirety.

[0517] The polynucleotides of the invention may be formulated in or with at least one cyclodextrin polymer. Cyclodextrin polymers and methods of making cyclodextrin polymers include those known in the art and described in US Pub. No. 20130184453, the contents of which are herein incorporated by reference in its entirety.

[0518] In one embodiment, the polynucleotides of the invention may be formulated in or with at least one crosslinked cation-binding polymers. Crosslinked cation-binding polymers and methods of making crosslinked cation-binding polymers include those known in the art and described in International Patent Publication No. WO2013106072, WO2013106073 and WO2013106086, the contents of each of which are herein incorporated by reference in its entirety.

[0519] In one embodiment, the polynucleotides of the invention may be formulated in or with at least one branched polymer. Branched polymers and methods of making branched polymers include those known in the art and described in International Patent Publication No. WO2013113071, the contents of each of which are herein incorporated by reference in its entirety.

[0520] In one embodiment, the polynucleotides of the invention may be formulated in or with at least PEGylated albumin polymer. PEGylated albumin polymer and methods of making PEGylated albumin polymer include those known in the art and described in US Patent Publication No. US20130231287, the contents of each of which are herein incorporated by reference in its entirety.

[0521] In one embodiment, the polymers described herein may be conjugated to a lipid-terminating PEG. As a non-limiting example, PLGA may be conjugated to a lipid-terminating PEG forming PLGA-DSPE-PEG. As another non-limiting example, PEG conjugates for use with the present invention are described in International Publication No. WO2008103276, herein incorporated by reference in its entirety. The polymers may be conjugated using a ligand conjugate such as, but not limited to, the conjugates described in U.S. Pat. No. 8,273,363, herein incorporated by reference in its entirety.

[0522] In one embodiment, the polynucleotides disclosed herein may be mixed with the PEGs or the sodium phosphate/sodium carbonate solution prior to administration. In another embodiment, a polynucleotides encoding a protein of interest may be mixed with the PEGs and also mixed with the sodium phosphate/sodium carbonate solution. In yet another embodiment, polynucleotides encoding a protein of interest may be mixed with the PEGs and a polynucleotides encoding a second protein of interest may be mixed with the sodium phosphate/sodium carbonate solution.

[0523] In one embodiment, the polynucleotides described herein may be conjugated with another compound. Non-limiting examples of conjugates are described in U.S. Pat. Nos. 7,964,578 and 7,833,992, each of which are herein incorporated by reference in their entireties. In another embodiment, modified RNA of the present invention may be conjugated with conjugates of formula 1-122 as described in U.S. Pat. Nos. 7,964,578 and 7,833,992, each of which are herein incorporated by reference in their entireties. The polynucleotides described herein may be conjugated with a metal such as, but not limited to, gold. (See e.g., Giljohann et al. Journ. Amer. Chem. Soc. 2009 131(6): 2072-2073; herein incorporated by reference in its entirety). In another embodiment, the polynucleotides described herein may be conjugated and/or encapsulated in gold-nanoparticles. (International Pub. No. WO201216269 and U.S. Pub. No. 20120302940 and US20130177523; the contents of each of which is herein incorporated by reference in its entirety).

[0524] As described in U.S. Pub. No. 20100004313, herein incorporated by reference in its entirety, a gene delivery composition may include a nucleotide sequence and a poloxamer. For example, the polynucleotides of the present invention may be used in a gene delivery composition with the poloxamer described in U.S. Pub. No. 20100004313.

[0525] In one embodiment, the polymer formulation of the present invention may be stabilized by contacting the polymer formulation, which may include a cationic carrier, with a cationic lipopolymer which may be covalently linked to cholesterol and polyethylene glycol groups. The polymer formulation may be contacted with a cationic lipopolymer using the methods described in U.S. Pub. No. 20090042829 herein incorporated by reference in its entirety. The cationic carrier may include, but is not limited to, polyethylenimine, poly(trimethylenimine), poly(tetramethylenimine), polypropylenimine, aminoglycoside-polyamine, dideoxy-diamino-b-cyclodextrin, spermine, spermidine, poly(2-dimethylamino)ethyl methacrylate, poly(lysine), poly(histidine), poly(arginine), cationized gelatin, dendrimers, chitosan, 1,2-Dioleoyl-3-Trimethylammonium-Propane(DOTAP), N-[1-(2,3-dioleoyloxy)propyl]-N,N,N-trimethylammonium chloride (DOTMA), 1-[2-(oleoyloxy)ethyl]-2-oleyl-3-(2-hydroxyethyl)imidazolinium chloride (DOTIM), 2,3-dioleyloxy-N-[2(sperminecarboxamido)ethyl]-N,N-dimethyl-1-propanaminium trifluoroacetate (DOSPA), 3B—[N—(N′,N′-Dimethylaminoethane)-carbamoyl]Cholesterol Hydrochloride (DC-Cholesterol HCl) diheptadecylamidoglycyl spermidine (DOGS), N,N-distearyl-N,N-dimethylammonium bromide (DDAB), N-(1,2-dimyristyloxyprop-3-yl)-N,N-dimethyl-N-hydroxyethyl ammonium bromide (DMRIE), N,N-dioleyl-N,N-dimethylammonium chloride DODAC) and combinations thereof. As a non-limiting example, the polynucleotides may be formulated with a cationic lipopolymer such as those described in U.S. Patent Application No. 20130065942, herein incorporated by reference in its entirety.

[0526] The polynucleotides of the invention may be formulated in a polyplex of one or more polymers (See e.g., U.S. Pat. No. 8,501,478, U.S. Pub. No. 20120237565 and 20120270927 and 20130149783 and International Patent Pub. No. WO2013090861; the contents of each of which is herein incorporated by reference in its entirety). As a non-limiting example, the polyplex may be formed using the novel alpha-aminoamidine polymers described in International Publication No. WO2013090861, the contents of which are herein incorporated by reference in its entirety. As another non-limiting example, the polyplex may be formed using the click polymers described in U.S. Pat. No. 8,501,478, the contents of which is herein incorporated by reference in its entirety.

[0527] In one embodiment, the polyplex comprises two or more cationic polymers. The cationic polymer may comprise a poly(ethylene imine) (PEI) such as linear PEI. In another embodiment, the polyplex comprises p(TETA/CBA) its PEGylated analog p(TETA/CBA)-g-PEG2k and mixtures thereof (see e.g., US Patent Publication No. US20130149783, the contents of which are herein incorporated by reference in its entirety.

[0528] The polynucleotides of the invention can also be formulated as a nanoparticle using a combination of polymers, lipids, and/or other biodegradable agents, such as, but not limited to, calcium phosphate. Components may be combined in a core-shell, hybrid, and/or layer-by-layer architecture, to allow for fine-tuning of the nanoparticle so to delivery of the polynucleotide, polynucleotides may be enhanced (Wang et al., Nat Mater. 2006 5:791-796; Fuller et al., Biomaterials. 2008 29:1526-1532; DeKoker et al., Adv Drug Deliv Rev. 2011 63:748-761; Endres et al., Biomaterials. 2011 32:7721-7731; Su et al., Mol Pharm. 2011 Jun. 6; 8(3):774-87; herein incorporated by reference in its entirety). As a non-limiting example, the nanoparticle may comprise a plurality of polymers such as, but not limited to hydrophilic-hydrophobic polymers (e.g., PEG-PLGA), hydrophobic polymers (e.g., PEG) and/or hydrophilic polymers (International Pub. No. WO20120225129; the contents of which is herein incorporated by reference in its entirety).

[0529] As another non-limiting example the nanoparticle comprising hydrophilic polymers for the polynucleotides may be those described in or made by the methods described in International Patent Publication No. WO2013119936, the contents of which are herein incorporated by reference in its entirety.

[0530] In one embodiment, the biodegradable polymers which may be used in the present invention are poly(ether-anhydride) block copolymers. As a non-limiting example, the biodegradable polymers used herein may be a block copolymer as described in International Patent Publication No WO2006063249, herein incorporated by reference in its entirety, or made by the methods described in International Patent Publication No WO2006063249, herein incorporated by reference in its entirety.

[0531] In another embodiment, the biodegradable polymers which may be used in the present invention are alkyl and cycloalkyl terminated biodegradable lipids. As a non-limiting example, the alkyl and cycloalkyl terminated biodegradable lipids may be those described in International Publication No. WO2013086322 and/or made by the methods described in International Publication No. WO2013086322; the contents of which are herein incorporated by reference in its entirety.

[0532] In yet another embodiment, the biodegradable polymers which may be used in the present invention are cationic lipids having one or more biodegradable group located in a lipid moiety. As a non-limiting example, the biodegradable lipids may be those described in US Patent Publication No. US20130195920, the contents of which are herein incorporated by reference in its entirety.

[0533] Biodegradable calcium phosphate nanoparticles in combination with lipids and/or polymers have been shown to deliver polynucleotides in vivo. In one embodiment, a lipid coated calcium phosphate nanoparticle, which may also contain a targeting ligand such as anisamide, may be used to deliver the polynucleotide, polynucleotides of the present invention. For example, to effectively deliver siRNA in a mouse metastatic lung model a lipid coated calcium phosphate nanoparticle was used (Li et al., J Contr Rel. 2010 142: 416-421; Li et al., J Contr Rel. 2012 158:108-114; Yang et al., Mol Ther. 2012 20:609-615; herein incorporated by reference in its entirety). This delivery system combines both a targeted nanoparticle and a component to enhance the endosomal escape, calcium phosphate, in order to improve delivery of the siRNA.

[0534] In one embodiment, calcium phosphate with a PEG-polyanion block copolymer may be used to delivery polynucleotides (Kazikawa et al., J Contr Rel. 2004 97:345-356; Kazikawa et al., J Contr Rel. 2006 111:368-370; the contents of each of which are herein incorporated by reference in its entirety).

[0535] In one embodiment, a PEG-charge-conversional polymer (Pitella et al., Biomaterials. 2011 32:3106-3114; the contents of which are herein incorporated by reference in its entirety) may be used to form a nanoparticle to deliver the polynucleotides of the present invention. The PEG-charge-conversional polymer may improve upon the PEG-polyanion block copolymers by being cleaved into a polycation at acidic pH, thus enhancing endosomal escape.

[0536] In one embodiment, a polymer used in the present invention may be a pentablock polymer such as, but not limited to, the pentablock polymers described in International Patent Publication No. WO2013055331, herein incorporated by reference in its entirety. As a non-limiting example, the pentablock polymer comprises PGA-PCL-PEG-PCL-PGA, wherein PEG is polyethylene glycol, PCL is poly(E-caprolactone), PGA is poly(glycolic acid), and PLA is poly(lactic acid). As another non-limiting example, the pentablock polymer comprises PEG-PCL-PLA-PCL-PEG, wherein PEG is polyethylene glycol, PCL is poly(E-caprolactone), PGA is poly(glycolic acid), and PLA is poly(lactic acid).

[0537] In one embodiment, a polymer which may be used in the present invention comprises at least one diepoxide and at least one aminoglycoside (See e.g., International Patent Publication No. WO2013055971, the contents of which are herein incorporated by reference in its entirety). The diepoxide may be selected from, but is not limited to, 1,4 butanediol diglycidyl ether (1,4 B), 1,4-cyclohexanedimethanol diglycidyl ether (1,4 C), 4-vinylcyclohexene diepoxide (4VCD), ethyleneglycol diglycidyl ether (EDGE), glycerol diglycidyl ether (GDE), neopentylglycol diglycidyl ether (NPDGE), poly(ethyleneglycol) diglycidyl ether (PEGDE), poly(propyleneglycol) diglycidyl ether (PPGDE) and resorcinol diglycidyl ether (RDE). The aminoglycoside may be selected from, but is not limited to, streptomycin, neomycin, framycetin, paromomycin, ribostamycin, kanamycin, amikacin, arbekacin, bekanamycin, dibekacin, tobramycin, spectinomycin, hygromycin, gentamicin, netilmicin, sisomicin, isepamicin, verdamicin, astromicin, and apramycin. As a non-limiting example, the polymers may be made by the methods described in International Patent Publication No. WO2013055971, the contents of which are herein incorporated by reference in its entirety. As another non-limiting example, compositions comprising any of the polymers comprising at least one least one diepoxide and at least one aminoglycoside may be made by the methods described in International Patent Publication No. WO2013055971, the contents of which are herein incorporated by reference in its entirety.

[0538] In one embodiment, a polymer which may be used in the present invention may be a cross-linked polymer. As a non-limiting example, the cross-linked polymers may be used to form a particle as described in U.S. Pat. No. 8,414,927, the contents of which are herein incorporated by reference in its entirety. As another non-limiting example, the cross-linked polymer may be obtained by the methods described in US Patent Publication No. US20130172600, the contents of which are herein incorporated by reference in its entirety.

[0539] In another embodiment, a polymer which may be used in the present invention may be a cross-linked polymer such as those described in U.S. Pat. No. 8,461,132, the contents of which are herein incorporated by reference in its entirety. As a non-limiting example, the cross-linked polymer may be used in a therapeutic composition for the treatment of a body tissue. The therapeutic composition may be administered to damaged tissue using various methods known in the art and/or described herein such as injection or catheterization.

[0540] In one embodiment, a polymer which may be used in the present invention may be a di-alphatic substituted pegylated lipid such as, but not limited to, those described in International Patent Publication No. WO2013049328, the contents of which are herein incorporated by reference in its entirety.

[0541] In one embodiment, a block copolymer is PEG-PLGA-PEG (see e.g., the thermosensitive hydrogel (PEG-PLGA-PEG) was used as a TGF-beta1 gene delivery vehicle in Lee et al. Thermosensitive Hydrogel as a Tgf-β1 Gene Delivery Vehicle Enhances Diabetic Wound Healing. Pharmaceutical Research, 2003 20(12): 1995-2000; as a controlled gene delivery system in Li et al. Controlled Gene Delivery System Based on Thermosensitive Biodegradable Hydrogel. Pharmaceutical Research 2003 20(6):884-888; and Chang et al., Non-ionic amphiphilic biodegradable PEG-PLGA-PEG copolymer enhances gene delivery efficiency in rat skeletal muscle. J Controlled Release. 2007 118:245-253; each of which is herein incorporated by reference in its entirety) may be used in the present invention. The present invention may be formulated with PEG-PLGA-PEG for administration such as, but not limited to, intramuscular and subcutaneous administration.

[0542] In another embodiment, the PEG-PLGA-PEG block copolymer is used in the present invention to develop a biodegradable sustained release system. In one aspect, the polynucleotides of the present invention are mixed with the block copolymer prior to administration. In another aspect, the polynucleotides acids of the present invention are co-administered with the block copolymer.

[0543] In one embodiment, the polymer used in the present invention may be a multi-functional polymer derivative such as, but not limited to, a multi-functional N-maleimidyl polymer derivatives as described in U.S. Pat. No. 8,454,946, the contents of which are herein incorporated by reference in its entirety.

[0544] The use of core-shell nanoparticles has additionally focused on a high-throughput approach to synthesize cationic cross-linked nanogel cores and various shells (Siegwart et al., Proc Natl Acad Sci USA. 2011 108:12996-13001; the contents of which are herein incorporated by reference in its entirety). The complexation, delivery, and internalization of the polymeric nanoparticles can be precisely controlled by altering the chemical composition in both the core and shell components of the nanoparticle. For example, the core-shell nanoparticles may efficiently deliver siRNA to mouse hepatocytes after they covalently attach cholesterol to the nanoparticle.

[0545] In one embodiment, a hollow lipid core comprising a middle PLGA layer and an outer neutral lipid layer containing PEG may be used to delivery of the polynucleotide, polynucleotides of the present invention. As a non-limiting example, in mice bearing a luciferase-expressing tumor, it was determined that the lipid-polymer-lipid hybrid nanoparticle significantly suppressed luciferase expression, as compared to a conventional lipoplex (Shi et al, Angew Chem Int Ed. 2011 50:7027-7031; herein incorporated by reference in its entirety).

[0546] In one embodiment, the lipid nanoparticles may comprise a core of the polynucleotides disclosed herein and a polymer shell. The polymer shell may be any of the polymers described herein and are known in the art. In an additional embodiment, the polymer shell may be used to protect the polynucleotides in the core.

[0547] Core-shell nanoparticles for use with the polynucleotides of the present invention are described and may be formed by the methods described in U.S. Pat. No. 8,313,777 or International Patent Publication No. WO2013124867, the contents of each of which are herein incorporated by reference in their entirety.

[0548] In one embodiment, the core-shell nanoparticles may comprise a core of the polynucleotides disclosed herein and a polymer shell. The polymer shell may be any of the polymers described herein and are known in the art. In an additional embodiment, the polymer shell may be used to protect the polynucleotides in the core.

[0549] In one embodiment, the polymer used with the formulations described herein may be a modified polymer (such as, but not limited to, a modified polyacetal) as described in International Publication No. WO2011120053, the contents of which are herein incorporated by reference in its entirety.

[0550] In one embodiment, the formulation may be a polymeric carrier cargo complex comprising a polymeric carrier and at least one nucleic acid molecule. Non-limiting examples of polymeric carrier cargo complexes are described in International Patent Publications Nos. WO2013113326, WO2013113501, WO2013113325, WO2013113502 and WO2013113736 and European Patent Publication No. EP2623121, the contents of each of which are herein incorporated by reference in their entireties. In one aspect the polymeric carrier cargo complexes may comprise a negatively charged nucleic acid molecule such as, but not limited to, those described in International Patent Publication Nos. WO2013113325 and WO2013113502, the contents of each of which are herein incorporated by reference in its entirety.

[0551] In one embodiment, a pharmaceutical composition may comprise polynucleotides of the invention and a polymeric carrier cargo complex. The polynucleotides may encode a protein of interest such as, but not limited to, an antigen from a pathogen associated with infectious disease, an antigen associated with allergy or allergic disease, an antigen associated with autoimmune disease or an antigen associated with cancer or tumor disease (See e.g., the antigens described in International Patent Publications Nos. WO2013113326, WO2013113501, WO2013113325, WO2013113502 and WO2013113736 and European Patent Publication No. EP2623121, the contents of each of which are herein incorporated by reference in their entireties).

[0552] As a non-limiting example, the core-shell nanoparticle may be used to treat an eye disease or disorder (See e.g. US Publication No. 20120321719, the contents of which are herein incorporated by reference in its entirety).

[0553] In one embodiment, the polymer used with the formulations described herein may be a modified polymer (such as, but not limited to, a modified polyacetal) as described in International Publication No. WO2011120053, the contents of which are herein incorporated by reference in its entirety.

### Peptides and Proteins

[0554] The polynucleotides of the invention can be formulated with peptides and/or proteins in order to increase transfection of cells by the polynucleotide. In one embodiment, peptides such as, but not limited to, cell penetrating peptides and proteins and peptides that enable intracellular delivery may be used to deliver pharmaceutical formulations. A non-limiting example of a cell penetrating peptide which may be used with the pharmaceutical formulations of the present invention includes a cell-penetrating peptide sequence attached to polycations that facilitates delivery to the intracellular space, e.g., HIV-derived TAT peptide, penetratins, transportans, or hCT derived cell-penetrating peptides (see, e.g., Caron et al., Mol. Ther. 3(3):310-8 (2001); Langel, Cell-Penetrating Peptides: Processes and Applications (CRC Press, Boca Raton Fla., 2002); El-Andaloussi et al., Curr. Pharm. Des. 11(28):3597-611 (2003); and Deshayes et al., Cell. Mol. Life Sci. 62(16):1839-49 (2005), all of which are incorporated herein by reference in their entirety). The compositions can also be formulated to include a cell penetrating agent, e.g., liposomes, which enhance delivery of the compositions to the intracellular space. Polynucleotides of the invention may be complexed to peptides and/or proteins such as, but not limited to, peptides and/or proteins from Aileron Therapeutics (Cambridge, Mass.) and Permeon Biologics (Cambridge, Mass.) in order to enable intracellular delivery (Cronican et al., ACS Chem. Biol. 2010 5:747-752; McNaughton et al., Proc. Natl. Acad. Sci. USA 2009 106:6111-6116; Sawyer, Chem Biol Drug Des. 2009 73:3-6; Verdine and Hilinski, Methods Enzymol. 2012; 503:3-33; all of which are herein incorporated by reference in its entirety).

[0555] In one embodiment, the cell-penetrating polypeptide may comprise a first domain and a second domain. The first domain may comprise a supercharged polypeptide. The second domain may comprise a protein-binding partner. As used herein, “protein-binding partner” includes, but are not limited to, antibodies and functional fragments thereof, scaffold proteins, or peptides. The cell-penetrating polypeptide may further comprise an intracellular binding partner for the protein-binding partner. The cell-penetrating polypeptide may be capable of being secreted from a cell where the polynucleotide may be introduced.

[0556] Formulations of the including peptides or proteins may be used to increase cell transfection by the polynucleotide, alter the biodistribution of the polynucleotide (e.g., by targeting specific tissues or cell types), and/or increase the translation of encoded protein. (See e.g., International Pub. No. WO2012110636 and WO2013123298; the contents of which are herein incorporated by reference in its entirety).

[0557] In one embodiment, the cell penetrating peptide may be, but is not limited to, those described in US Patent Publication No US20130129726, US20130137644 and US20130164219, each of which is herein incorporated by reference in its entirety.

### Cells

[0558] The polynucleotides of the invention can be transfected ex vivo into cells, which are subsequently transplanted into a subject. As non-limiting examples, the pharmaceutical compositions may include red blood cells to deliver modified RNA to liver and myeloid cells, virosomes to deliver modified RNA in virus-like particles (VLPs), and electroporated cells such as, but not limited to, from MAXCYTE® (Gaithersburg, Md.) and from ERYTECH® (Lyon, France) to deliver modified RNA. Examples of use of red blood cells, viral particles and electroporated cells to deliver payloads other than polynucleotides have been documented (Godfrin et al., Expert Opin Biol Ther. 2012 12:127-133; Fang et al., Expert Opin Biol Ther. 2012 12:385-389; Hu et al., Proc Natl Acad Sci USA. 2011 108:10980-10985; Lund et al., Pharm Res. 2010 27:400-420; Huckriede et al., J Liposome Res. 2007; 17:39-47; Cusi, Hum Vaccin. 2006 2:1-7; de Jonge et al., Gene Ther. 2006 13:400-411; all of which are herein incorporated by reference in its entirety).

[0559] The polynucleotides may be delivered in synthetic VLPs synthesized by the methods described in International Pub No. WO2011085231 and WO2013116656 and US Pub No. 20110171248, the contents of each of which are herein incorporated by reference in their entireties.

[0560] Cell-based formulations of the polynucleotides of the invention may be used to ensure cell transfection (e.g., in the cellular carrier), alter the biodistribution of the polynucleotide (e.g., by targeting the cell carrier to specific tissues or cell types), and/or increase the translation of encoded protein.

Introduction into Cells

[0561] A variety of methods are known in the art and suitable for introduction of nucleic acid into a cell, including viral and non-viral mediated techniques. Examples of typical non-viral mediated techniques include, but are not limited to, electroporation, calcium phosphate mediated transfer, nucleofection, sonoporation, heat shock, magnetofection, liposome mediated transfer, microinjection, microprojectile mediated transfer (nanoparticles), cationic polymer mediated transfer (DEAE-dextran, polyethylenimine, polyethylene glycol (PEG) and the like) or cell fusion.

[0562] The technique of sonoporation, or cellular sonication, is the use of sound (e.g., ultrasonic frequencies) for modifying the permeability of the cell plasma membrane. Sonoporation methods are known to those in the art and are used to deliver nucleic acids in vivo (Yoon and Park, Expert Opin Drug Deliv. 2010 7:321-330; Postema and Gilja, Curr Pharm Biotechnol. 2007 8:355-361; Newman and Bettinger, Gene Ther. 2007 14:465-475; all herein incorporated by reference in their entirety). Sonoporation methods are known in the art and are also taught for example as it relates to bacteria in US Patent Publication 20100196983 and as it relates to other cell types in, for example, US Patent Publication 20100009424, each of which are incorporated herein by reference in their entirety.

[0563] Electroporation techniques are also well known in the art and are used to deliver nucleic acids in vivo and clinically (Andre et al., Curr Gene Ther. 2010 10:267-280; Chiarella et al., Curr Gene Ther. 2010 10:281-286; Hojman, Curr Gene Ther. 2010 10:128-138; all herein incorporated by reference in their entirety). Electroporation devices are sold by many companies worldwide including, but not limited to BTX® Instruments (Holliston, Mass.) (e.g., the AgilePulse In Vivo System) and Inovio (Blue Bell, Pa.) (e.g., Inovio SP-5P intramuscular delivery device or the CELLECTRA® 3000 intradermal delivery device). In one embodiment, polynucleotides may be delivered by electroporation as described in Example 9.

### Micro-Organ

[0564] The polynucleotides may be contained in a micro-organ which can then express an encoded polypeptide of interest in a long-lasting therapeutic formulation. In one aspect, the micro-organ may comprise a vector comprising a nucleic acid sequence (e.g., the polynucleotides of the present invention) encoding a polypeptide of interest, operably linked to one or more regulatory sequences. Micro-organs are described in co-pending International Patent Publication No. WO2015038892, the contents of which is incorporated by reference in its entirety, such as, but not limited to, in paragraphs [000672]-[000677].

### Hyaluronidase

[0565] The intramuscular or subcutaneous localized injection of polynucleotides of the invention can include hyaluronidase, which catalyzes the hydrolysis of hyaluronan. By catalyzing the hydrolysis of hyaluronan, a constituent of the interstitial barrier, hyaluronidase lowers the viscosity of hyaluronan, thereby increasing tissue permeability (Frost, Expert Opin. Drug Deliv. (2007) 4:427-440; herein incorporated by reference in its entirety). It is useful to speed their dispersion and systemic distribution of encoded proteins produced by transfected cells. Alternatively, the hyaluronidase can be used to increase the number of cells exposed to a polynucleotide of the invention administered intramuscularly or subcutaneously.

### Nanoparticle Mimics

[0566] The polynucleotides of the invention may be encapsulated within and/or absorbed to a nanoparticle mimic. A nanoparticle mimic can mimic the delivery function organisms or particles such as, but not limited to, pathogens, viruses, bacteria, fungus, parasites, prions and cells. As a non-limiting example the polynucleotides of the invention may be encapsulated in a non-viron particle which can mimic the delivery function of a virus (see International Pub. No. WO2012006376 and US Patent Publication No. US20130171241 and US20130195968, the contents of each of which are herein incorporated by reference in its entirety).

### Nanotubes

[0567] The polynucleotides of the invention can be attached or otherwise bound to at least one nanotube such as, but not limited to, rosette nanotubes, rosette nanotubes having twin bases with a linker, carbon nanotubes and/or single-walled carbon nanotubes, The polynucleotides may be bound to the nanotubes through forces such as, but not limited to, steric, ionic, covalent and/or other forces. Nanotubes are described in co-pending International Patent Publication No. WO2015038892, the contents of which is incorporated by reference in its entirety, such as, but not limited to, in paragraphs [000679]-[000684].

### Conjugates

[0568] The polynucleotides of the invention include conjugates, such as a polynucleotide covalently linked to a carrier or targeting group, or including two encoding regions that together produce a fusion protein (e.g., bearing a targeting group and therapeutic protein or peptide).

[0569] The conjugates of the invention include a naturally occurring substance, such as a protein (e.g., human serum albumin (HSA), low-density lipoprotein (LDL), high-density lipoprotein (HDL), or globulin); an carbohydrate (e.g., a dextran, pullulan, chitin, chitosan, inulin, cyclodextrin or hyaluronic acid); or a lipid. The ligand may also be a recombinant or synthetic molecule, such as a synthetic polymer, e.g., a synthetic polyamino acid, an oligonucleotide (e.g. an aptamer). Examples of polyamino acids include polyamino acid is a polylysine (PLL), poly L-aspartic acid, poly L-glutamic acid, styrene-maleic acid anhydride copolymer, poly(L-lactide-co-glycolied) copolymer, divinyl ether-maleic anhydride copolymer, N-(2-hydroxypropyl)methacrylamide copolymer (HMPA), polyethylene glycol (PEG), polyvinyl alcohol (PVA), polyurethane, poly(2-ethylacryllic acid), N-isopropylacrylamide polymers, or polyphosphazine. Example of polyamines include: polyethylenimine, polylysine (PLL), spermine, spermidine, polyamine, pseudopeptide-polyamine, peptidomimetic polyamine, dendrimer polyamine, arginine, amidine, protamine, cationic lipid, cationic porphyrin, quaternary salt of a polyamine, or an alpha helical peptide.

[0570] Representative U.S. patents that teach the preparation of polynucleotide conjugates, particularly to RNA, include, but are not limited to, U.S. Pat. Nos. 4,828,979; 4,948,882; 5,218,105; 5,525,465; 5,541,313; 5,545,730; 5,552,538; 5,578,717, 5,580,731; 5,591,584; 5,109,124; 5,118,802; 5,138,045; 5,414,077; 5,486,603; 5,512,439; 5,578,718; 5,608,046; 4,587,044; 4,605,735; 4,667,025; 4,762,779; 4,789,737; 4,824,941; 4,835,263; 4,876,335; 4,904,582; 4,958,013; 5,082,830; 5,112,963; 5,214,136; 5,082,830; 5,112,963; 5,214,136; 5,245,022; 5,254,469; 5,258,506; 5,262,536; 5,272,250; 5,292,873; 5,317,098; 5,371,241, 5,391,723; 5,416,203, 5,451,463; 5,510,475; 5,512,667; 5,514,785; 5,565,552; 5,567,810; 5,574,142; 5,585,481; 5,587,371; 5,595,726; 5,597,696; 5,599,923; 5,599,928 and 5,688,941; 6,294,664; 6,320,017; 6,576,752; 6,783,931; 6,900,297; 7,037,646; each of which is herein incorporated by reference in their entireties.

[0571] In one embodiment, the conjugate of the present invention may function as a carrier for the polynucleotides of the present invention. The conjugate may comprise a cationic polymer such as, but not limited to, polyamine, polylysine, polyalkylenimine, and polyethylenimine which may be grafted to with poly(ethylene glycol). As a non-limiting example, the conjugate may be similar to the polymeric conjugate and the method of synthesizing the polymeric conjugate described in U.S. Pat. No. 6,586,524 herein incorporated by reference in its entirety.

[0572] A non-limiting example of a method for conjugation to a substrate is described in US Patent Publication No. US20130211249, the contents of which are herein incorporated by reference in its entirety. The method may be used to make a conjugated polymeric particle comprising a polynucleotide.

[0573] The conjugates can also include targeting groups, e.g., a cell or tissue targeting agent, e.g., a lectin, glycoprotein, lipid or protein, e.g., an antibody, that binds to a specified cell type such as a kidney cell. A targeting group can be a thyrotropin, melanotropin, lectin, glycoprotein, surfactant protein A, Mucin carbohydrate, multivalent lactose, multivalent galactose, N-acetyl-galactosamine, N-acetyl-gulucosamine multivalent mannose, multivalent fucose, glycosylated polyaminoacids, multivalent galactose, transferrin, bisphosphonate, polyglutamate, polyaspartate, a lipid, cholesterol, a steroid, bile acid, folate, vitamin B12, biotin, an RGD peptide, an RGD peptide mimetic or an aptamer.

[0574] Targeting groups can be proteins, e.g., glycoproteins, or peptides, e.g., molecules having a specific affinity for a co-ligand, or antibodies e.g., an antibody, that binds to a specified cell type such as a cancer cell, endothelial cell, or bone cell. Targeting groups may also include hormones and hormone receptors. They can also include non-peptidic species, such as lipids, lectins, carbohydrates, vitamins, cofactors, multivalent lactose, multivalent galactose, N-acetyl-galactosamine, N-acetyl-gulucosamine multivalent mannose, multivalent fucose, or aptamers. The ligand can be, for example, a lipopolysaccharide, or an activator of p38 MAP kinase.

[0575] The targeting group can be any ligand that is capable of targeting a specific receptor. Examples include, without limitation, folate, GalNAc, galactose, mannose, mannose-6P, aptamers, integrin receptor ligands, chemokine receptor ligands, transferrin, biotin, serotonin receptor ligands, PSMA, endothelin, GCPII, somatostatin, LDL, and HDL ligands. In particular embodiments, the targeting group is an aptamer. The aptamer can be unmodified or have any combination of modifications disclosed herein.

[0576] As a non-limiting example, the targeting group may be a glutathione receptor (GR)-binding conjugate for targeted delivery across the blood-central nervous system barrier (See e.g., US Patent Publication No. US2013021661012, the contents of which are herein incorporated by reference in its entirety.

[0577] In one embodiment, the conjugate of the present invention may be a synergistic biomolecule-polymer conjugate. The synergistic biomolecule-polymer conjugate may be long-acting continuous-release system to provide a greater therapeutic efficacy. The synergistic biomolecule-polymer conjugate may be those described in US Patent Publication No. US20130195799, the contents of which are herein incorporated by reference in its entirety.

[0578] In another embodiment, the conjugate which may be used in the present invention may be an aptamer conjugate. Non-limiting examples of aptamers conjugates are described in International Patent Publication No. WO2012040524, the contents of which are herein incorporated by reference in its entirety. The aptamer conjugates may be used to provide targeted delivery of formulations comprising polynucleotides.

[0579] In one embodiment, the conjugate which may be used in the present invention may be an amine containing polymer conjugate. Non-limiting examples of amine containing polymer conjugate are described in U.S. Pat. No. 8,507,653, the contents of which are herein incorporated by reference in its entirety. The factor IX moiety polymer conjugate may be comprise releasable linkages to release the polynucleotides upon and/or after delivery to a subject.

[0580] In one embodiment, pharmaceutical compositions of the present invention may include chemical modifications such as, but not limited to, modifications similar to locked nucleic acids.

[0581] Representative U.S. Patents that teach the preparation of locked nucleic acid (LNA) such as those from Santaris, include, but are not limited to, the following: U.S. Pat. Nos. 6,268,490; 6,670,461; 6,794,499; 6,998,484; 7,053,207; 7,084,125; and 7,399,845, each of which is herein incorporated by reference in its entirety.

[0582] Representative U.S. patents that teach the preparation of PNA compounds include, but are not limited to, U.S. Pat. Nos. 5,539,082; 5,714,331; and 5,719,262, each of which is herein incorporated by reference. Further teaching of PNA compounds can be found, for example, in Nielsen et al., Science, 1991, 254, 1497-1500.

[0583] Some embodiments featured in the invention include polynucleotides with phosphorothioate backbones and oligonucleotides with other modified backbones, and in particular —CH₂—NH—CH₂—, —CH₂—N(CH₃)—O—CH₂-[known as a methylene (methylimino) or MMI backbone], —CH₂—O—N(CH₃)—CH₂—, —CH₂—N(CH₃)—N(CH₃)—CH₂— and —N(CH₃)—CH₂—CH₂-[wherein the native phosphodiester backbone is represented as —O—P(O)₂—O—CH₂—] of the above-referenced U.S. Pat. No. 5,489,677, and the amide backbones of the above-referenced U.S. Pat. No. 5,602,240. In some embodiments, the polynucleotides featured herein have morpholino backbone structures of the above-referenced U.S. Pat. No. 5,034,506.

[0584] Modifications at the 2′ position may also aid in delivery. Preferably, modifications at the 2′ position are not located in a polypeptide-coding sequence, i.e., not in a translatable region. Modifications at the 2′ position may be located in a 5′UTR, a 3′UTR and/or a tailing region. Modifications at the 2′ position can include one of the following at the 2′ position: H (i.e., 2′-deoxy); F; O-, S-, or N-alkyl; O-, S-, or N-alkenyl; O-, S- or N-alkynyl; or O-alkyl-O-alkyl, wherein the alkyl, alkenyl and alkynyl may be substituted or unsubstituted C₁ to C₁₀ alkyl or C₂ to C₁₀ alkenyl and alkynyl. Exemplary suitable modifications include O[(CH₂)ₙO]ₘCH₃, O(CH₂).ₙOCH₃, O(CH₂)ₙNH₂, O(CH₂)ₙCH₃, O(CH₂)ₙONH₂, and O(CH₂)ₙON[(CH₂)ₙCH₃)]₂, where n and m are from 1 to about 10. In other embodiments, the polynucleotides include one of the following at the 2′ position: C₁ to C₁₀ lower alkyl, substituted lower alkyl, alkaryl, aralkyl, O-alkaryl or O-aralkyl, SH, SCH₃, OCN, Cl, Br, CN, CF₃, OCF₃, SOCH₃, SO₂CH₃, ONO₂, NO₂, N₃, NH₂, heterocycloalkyl, heterocycloalkaryl, aminoalkylamino, polyalkylamino, substituted silyl, an RNA cleaving group, a reporter group, an intercalator, a group for improving the pharmacokinetic properties, or a group for improving the pharmacodynamic properties, and other substituents having similar properties. In some embodiments, the modification includes a 2′-methoxyethoxy (2′-O—CH₂CH₂OCH₃, also known as 2′-O-(2-methoxyethyl) or 2′-MOE) (Martin et al., Helv. Chim. Acta, 1995, 78:486-504) i.e., an alkoxy-alkoxy group. Another exemplary modification is 2′-dimethylaminooxyethoxy, i.e., a O(CH₂)₂ON(CH₃)₂ group, also known as 2′-DMAOE, as described in examples herein below, and 2′-dimethylaminoethoxyethoxy (also known in the art as 2′-O-dimethylaminoethoxyethyl or 2′-DMAEOE), i.e., 2′-O—CH₂—O—CH₂—N(CH₂)₂, also described in examples herein below. Other modifications include 2′-methoxy (2′-OCH₃), 2′-aminopropoxy (2′-OCH₂CH₂CH₂NH₂) and 2′-fluoro (2′-F). Similar modifications may also be made at other positions, particularly the 3′ position of the sugar on the 3′ terminal nucleotide or in 2′-5′ linked dsRNAs and the 5′ position of 5′ terminal nucleotide. Polynucleotides of the invention may also have sugar mimetics such as cyclobutyl moieties in place of the pentofuranosyl sugar. Representative U.S. patents that teach the preparation of such modified sugar structures include, but are not limited to, U.S. Pat. Nos. 4,981,957; 5,118,800; 5,319,080; 5,359,044; 5,393,878; 5,446,137; 5,466,786; 5,514,785; 5,519,134; 5,567,811; 5,576,427; 5,591,722; 5,597,909; 5,610,300; 5,627,053; 5,639,873; 5,646,265; 5,658,873; 5,670,633; and 5,700,920; the contents of each of which is herein incorporated by reference in their entirety.

[0585] In still other embodiments, the polynucleotide is covalently conjugated to a cell penetrating polypeptide. The cell-penetrating peptide may also include a signal sequence. The conjugates of the invention can be designed to have increased stability; increased cell transfection; and/or altered the biodistribution (e.g., targeted to specific tissues or cell types).

[0586] In one embodiment, the polynucleotides may be conjugated to an agent to enhance delivery. As a non-limiting example, the agent may be a monomer or polymer such as a targeting monomer or a polymer having targeting blocks as described in International Publication No. WO2011062965, herein incorporated by reference in its entirety. In another non-limiting example, the agent may be a transport agent covalently coupled to the polynucleotides of the present invention (See e.g., U.S. Pat. Nos. 6,835,393 and 7,374,778, each of which is herein incorporated by reference in its entirety). In yet another non-limiting example, the agent may be a membrane barrier transport enhancing agent such as those described in U.S. Pat. Nos. 7,737,108 and 8,003,129, each of which is herein incorporated by reference in its entirety.

[0587] In another embodiment, polynucleotides may be conjugated to SMARTT POLYMER TECHNOLOGY® (PHASERX®, Inc. Seattle, Wash.).

[0588] In another aspect, the conjugate may be a peptide that selectively directs the nanoparticle to neurons in a tissue or organism. As a non-limiting example, the peptide used may be, but is not limited to, the peptides described in US Patent Publication No US20130129627, herein incorporated by reference in its entirety.

[0589] In yet another aspect, the conjugate may be a peptide that can assist in crossing the blood-brain barrier.

### Self-Assembled Nanoparticles

[0590] Self-assembled nanoparticles have a well-defined size which may be precisely controlled as the nucleic acid strands may be easily reprogrammable. The polynucleotides described herein may be formulated in self-assembled nanoparticles. Nucleic acid self-assembled nanoparticles are described in International Patent Publication No. WO2014152211, the contents of which are herein incorporated by reference in its entirety, such as in paragraphs [000740]-[000743]. Polymer-based self-assembled nanoparticles are described in International Patent Publication No. WO2014152211, the contents of which are herein incorporated by reference in its entirety, such as in paragraphs [000744]-[000749].

### Self-Assembled Macromolecules

[0591] The polynucleotides may be formulated in amphiphilic macromolecules (AMs) for delivery. AMs comprise biocompatible amphiphilic polymers which have an alkylated sugar backbone covalently linked to poly(ethylene glycol). In aqueous solution, the AMs self-assemble to form micelles. Non-limiting examples of methods of forming AMs and AMs are described in US Patent Publication No. US20130217753, the contents of which are herein incorporated by reference in its entirety.

### Inorganic Nanoparticles

[0592] The polynucleotides of the present invention may be formulated in inorganic nanoparticles (U.S. Pat. No. 8,257,745, herein incorporated by reference in its entirety). The inorganic nanoparticles may include, but are not limited to, clay substances that are water swellable. As a non-limiting example, the inorganic nanoparticle may include synthetic smectite clays which are made from simple silicates (See e.g., U.S. Pat. Nos. 5,585,108 and 8,257,745 each of which are herein incorporated by reference in their entirety).

[0593] In one embodiment, the inorganic nanoparticles may comprise a core of the polynucleotides disclosed herein and a polymer shell. The polymer shell may be any of the polymers described herein and are known in the art. In an additional embodiment, the polymer shell may be used to protect the polynucleotides in the core.

### Semi-Conductive and Metallic Nanoparticles

[0594] The polynucleotides of the present invention may be formulated in water-dispersible nanoparticle comprising a semiconductive or metallic material (U.S. Pub. No. 20120228565; herein incorporated by reference in its entirety) or formed in a magnetic nanoparticle (U.S. Pub. No. 20120265001 and 20120283503; each of which is herein incorporated by reference in its entirety). The water-dispersible nanoparticles may be hydrophobic nanoparticles or hydrophilic nanoparticles.

[0595] In one embodiment, the semi-conductive and/or metallic nanoparticles may comprise a core of the polynucleotides disclosed herein and a polymer shell. The polymer shell may be any of the polymers described herein and are known in the art. In an additional embodiment, the polymer shell may be used to protect the polynucleotides in the core.

### Surgical Sealants: Gels and Hydrogels

[0596] In one embodiment, the polynucleotides disclosed herein may be encapsulated into any hydrogel known in the art which may form a gel when injected into a subject. Surgical sealants such as gels and hydrogels are described in International Patent Publication No. WO2014152211, the contents of which are herein incorporated by reference in its entirety, such as in paragraphs [000762]-[000809].

### Suspension Formulations

[0597] In some embodiments, suspension formulations are provided comprising polynucleotides, water immiscible oil depots, surfactants and/or co-surfactants and/or co-solvents. Combinations of oils and surfactants may enable suspension formulation with polynucleotides. Delivery of polynucleotides in a water immiscible depot may be used to improve bioavailability through sustained release of mRNA from the depot to the surrounding physiologic environment and prevent polynucleotides degradation by nucleases.

[0598] In some embodiments, suspension formulations of mRNA may be prepared using combinations of polynucleotides, oil-based solutions and surfactants. Such formulations may be prepared as a two-part system comprising an aqueous phase comprising polynucleotides and an oil-based phase comprising oil and surfactants. Exemplary oils for suspension formulations may include, but are not limited to sesame oil and Miglyol (comprising esters of saturated coconut and palmkernel oil-derived caprylic and capric fatty acids and glycerin or propylene glycol), corn oil, soybean oil, peanut oil, beeswax and/or palm seed oil. Exemplary surfactants may include, but are not limited to Cremophor, polysorbate 20, polysorbate 80, polyethylene glycol, transcutol, Capmul®, labrasol, isopropyl myristate, and/or Span 80. In some embodiments, suspensions may comprise co-solvents including, but not limited to ethanol, glycerol and/or propylene glycol.

[0599] Suspensions may be formed by first preparing polynucleotides formulation comprising an aqueous solution of polynucleotide and an oil-based phase comprising one or more surfactants. Suspension formation occurs as a result of mixing the two phases (aqueous and oil-based). In some embodiments, such a suspension may be delivered to an aqueous phase to form an oil-in-water emulsion. In some embodiments, delivery of a suspension to an aqueous phase results in the formation of an oil-in-water emulsion in which the oil-based phase comprising polynucleotides forms droplets that may range in size from nanometer-sized droplets to micrometer-sized droplets. In some embodiments, specific combinations of oils, surfactants, cosurfactants and/or co-solvents may be utilized to suspend polynucleotides in the oil phase and/or to form oil-in-water emulsions upon delivery into an aqueous environment.

[0600] In some embodiments, suspensions may provide modulation of the release of polynucleotides into the surrounding environment. In such embodiments, polynucleotides release may be modulated by diffusion from a water immiscible depot followed by resolubilization into a surrounding environment (e.g. an aqueous environment).

[0601] In some embodiments, polynucleotides within a water immiscible depot (e.g. suspended within an oil phase) may result in altered polynucleotides stability (e.g. altered degradation by nucleases).

[0602] In some embodiments, polynucleotides may be formulated such that upon injection, an emulsion forms spontaneously (e.g. when delivered to an aqueous phase). Such particle formation may provide a high surface area to volume ratio for release of polynucleotides from an oil phase to an aqueous phase.

[0603] In one embodiment, the polynucleotides may be formulated in a nanoemulsion such as, but not limited to, the nanoemulsions described in U.S. Pat. No. 8,496,945, the contents of which are herein incorporated by reference in its entirety. The nanoemulsions may comprise nanoparticles described herein. As a non-limiting example, the nanoparticles may comprise a liquid hydrophobic core which may be surrounded or coated with a lipid or surfactant layer. The lipid or surfactant layer may comprise at least one membrane-integrating peptide and may also comprise a targeting ligand (see e.g., U.S. Pat. No. 8,496,945, the contents of which are herein incorporated by reference in its entirety).

### Cations and Anions

[0604] Formulations of polynucleotides disclosed herein may include cations or anions. In one embodiment, the formulations include metal cations such as, but not limited to, Zn2+, Ca2+, Cu2+, Mg+ and combinations thereof. As a non-limiting example, formulations may include polymers and a polynucleotides complexed with a metal cation (See e.g., U.S. Pat. Nos. 6,265,389 and 6,555,525, each of which is herein incorporated by reference in its entirety).

[0605] In some embodiments, cationic nanoparticles comprising combinations of divalent and monovalent cations may be formulated with polynucleotides. Such nanoparticles may form spontaneously in solution over a given period (e.g. hours, days, etc.). Such nanoparticles do not form in the presence of divalent cations alone or in the presence of monovalent cations alone. The delivery of polynucleotides in cationic nanoparticles or in one or more depot comprising cationic nanoparticles may improve polynucleotide bioavailability by acting as a long-acting depot and/or reducing the rate of degradation by nucleases.

### Molded Nanoparticles and Microparticles

[0606] The polynucleotides disclosed herein may be formulated in nanoparticles and/or microparticles. These nanoparticles and/or microparticles may be molded into any size shape and chemistry. As an example, the nanoparticles and/or microparticles may be made using the PRINT® technology by LIQUIDA TECHNOLOGIES® (Morrisville, N.C.) (See e.g., International Pub. No. WO2007024323; the contents of which are herein incorporated by reference in its entirety).

[0607] In one embodiment, the molded nanoparticles may comprise a core of the polynucleotides disclosed herein and a polymer shell. The polymer shell may be any of the polymers described herein and are known in the art. In an additional embodiment, the polymer shell may be used to protect the polynucleotides in the core.

[0608] In one embodiment, the polynucleotides of the present invention may be formulated in microparticles. The microparticles may contain a core of the polynucleotides and a cortext of a biocompatible and/or biodegradable polymer. As a non-limiting example, the microparticles which may be used with the present invention may be those described in U.S. Pat. No. 8,460,709, U.S. Patent Publication No. US20130129830 and International Patent Publication No WO2013075068, each of which is herein incorporated by reference in its entirety. As another non-limiting example, the microparticles may be designed to extend the release of the polynucleotides of the present invention over a desired period of time (see e.g., extended release of a therapeutic protein in U.S. Patent Publication No. US20130129830, herein incorporated by reference in its entirety).

[0609] The microparticle for use with the present invention may have a diameter of at least 1 micron to at least 100 microns (e.g., at least 1 micron, at least 5 micron, at least 10 micron, at least 15 micron, at least 20 micron, at least 25 micron, at least 30 micron, at least 35 micron, at least 40 micron, at least 45 micron, at least 50 micron, at least 55 micron, at least 60 micron, at least 65 micron, at least 70 micron, at least 75 micron, at least 80 micron, at least 85 micron, at least 90 micron, at least 95 micron, at least 97 micron, at least 99 micron, and at least 100 micron).

### NanoJackets and NanoLiposomes

[0610] The polynucleotides disclosed herein may be formulated in NanoJackets and NanoLiposomes by Keystone Nano (State College, Pa.). NanoJackets are made of compounds that are naturally found in the body including calcium, phosphate and may also include a small amount of silicates. Nanojackets may range in size from 5 to 50 nm and may be used to deliver hydrophilic and hydrophobic compounds such as, but not limited to, polynucleotides.

[0611] NanoLiposomes are made of lipids such as, but not limited to, lipids which naturally occur in the body. NanoLiposomes may range in size from 60-80 nm and may be used to deliver hydrophilic and hydrophobic compounds such as, but not limited to, polynucleotides. In one aspect, the polynucleotides disclosed herein are formulated in a NanoLiposome such as, but not limited to, Ceramide NanoLiposomes.

### Pseudovirions

[0612] In one embodiment, the polynucleotides disclosed herein may be formulated in Pseudovirions (e.g., pseudo-virions). Pseudovirions are described in paragraphs [000593]-[000598] of International Patent Publication No. WO2015058069, the contents of which are herein incorporated by reference in its entirety.

### Minicells

[0613] In one aspect, the polynucleotides may be formulated in bacterial minicells. As a non-limiting example, bacterial minicells may be those described in International Publication No. WO2013088250 or US Patent Publication No. US20130177499, the contents of each of which are herein incorporated by reference in its entirety. The bacterial minicells comprising therapeutic agents such as polynucleotides described herein may be used to deliver the therapeutic agents to brain tumors.

### Semi-Solid Compositions

[0614] In one embodiment, the polynucleotides may be formulated with a hydrophobic matrix to form a semi-solid composition. As a non-limiting example, the semi-solid composition or paste-like composition may be made by the methods described in International Patent Publication No WO201307604, herein incorporated by reference in its entirety. The semi-solid composition may be a sustained release formulation as described in International Patent Publication No WO201307604, herein incorporated by reference in its entirety.

[0615] In another embodiment, the semi-solid composition may further have a micro-porous membrane or a biodegradable polymer formed around the composition (see e.g., International Patent Publication No WO201307604, herein incorporated by reference in its entirety).

[0616] The semi-solid composition using the polynucleotides of the present invention may have the characteristics of the semi-solid mixture as described in International Patent Publication No WO201307604, herein incorporated by reference in its entirety (e.g., a modulus of elasticity of at least 10⁻⁴ N·mm⁻², and/or a viscosity of at least 100 mPa·s).

### Exosomes

[0617] In one embodiment, the polynucleotides may be formulated in exosomes. The exosomes may be loaded with at least one polynucleotide and delivered to cells, tissues and/or organisms. As a non-limiting example, the polynucleotides may be loaded in the exosomes described in International Publication No. WO2013084000, herein incorporated by reference in its entirety.

### Silk-Based Delivery

[0618] In one embodiment, the polynucleotides may be formulated in a sustained release silk-based delivery system. The silk-based delivery system may be formed by contacting a silk fibroin solution with a therapeutic agent such as, but not limited to, the polynucleotides described herein and/or known in the art. As a non-limiting example, the sustained release silk-based delivery system which may be used in the present invention and methods of making such system are described in US Patent Publication No. US20130177611, the contents of which are herein incorporated by reference in its entirety.

### Microparticles

[0619] In one embodiment, formulations comprising polynucleotides may comprise microparticles. The microparticles may comprise a polymer described herein and/or known in the art such as, but not limited to, poly(α-hydroxy acid), a polyhydroxy butyric acid, a polycaprolactone, a polyorthoester and a polyanhydride. The microparticle may have adsorbent surfaces to adsorb biologically active molecules such as polynucleotides. As a non-limiting example microparticles for use with the present invention and methods of making microparticles are described in US Patent Publication No. US2013195923 and US20130195898 and U.S. Pat. Nos. 8,309,139 and 8,206,749, the contents of each of which are herein incorporated by reference in its entirety.

[0620] In another embodiment, the formulation may be a microemulsion comprising microparticles and polynucleotides. As a non-limiting example, microemulsions comprising microparticles are described in US Patent Publication No. US2013195923 and US20130195898 and U.S. Pat. Nos. 8,309,139 and 8,206,749, the contents of each of which are herein incorporated by reference in its entirety.

### Amino Acid Lipids

[0621] In one embodiment, the polynucleotides may be formulated in amino acid lipids. Amino acid lipids are lipophilic compounds comprising an amino acid residue and one or more lipophilic tails. Non-limiting examples of amino acid lipids and methods of making amino acid lipids are described in U.S. Pat. No. 8,501,824, the contents of which are herein incorporated by reference in its entirety.

[0622] In one embodiment, the amino acid lipids have a hydrophilic portion and a lipophilic portion. The hydrophilic portion may be an amino acid residue and a lipophilic portion may comprise at least one lipophilic tail.

[0623] In one embodiment, the amino acid lipid formulations may be used to deliver the polynucleotides to a subject.

[0624] In another embodiment, the amino acid lipid formulations may deliver a polynucleotide in releasable form which comprises an amino acid lipid that binds and releases the polynucleotides. As a non-limiting example, the release of the polynucleotides may be provided by an acid-labile linker such as, but not limited to, those described in U.S. Pat. Nos. 7,098,032, 6,897,196, 6,426,086, 7,138,382, 5,563,250, and 5,505,931, the contents of each of which are herein incorporated by reference in its entirety.

### Microvesicles

[0625] In one embodiment, polynucleotides may be formulated in microvesicles. Non-limiting examples of microvesicles include those described in US Patent Publication No. US20130209544, the contents of which are herein incorporated by reference in its entirety.

[0626] In one embodiment, the microvesicle is an ARRDC1-mediated microvesicles (ARMMs). Non-limiting examples of ARMMs and methods of making ARMMs are described in International Patent Publication No. WO2013119602, the contents of which are herein incorporated by reference in its entirety.

### Interpolyelectrolyte Complexes

[0627] In one embodiment, the polynucleotides may be formulated in an interpolyelectrolyte complex. Interpolyelectrolyte complexes are formed when charge-dynamic polymers are complexed with one or more anionic molecules. Non-limiting examples of charge-dynamic polymers and interpolyelectrolyte complexes and methods of making interpolyelectrolyte complexes are described in U.S. Pat. No. 8,524,368, the contents of which is herein incorporated by reference in its entirety.

### Crystalline Polymeric Systems

[0628] In one embodiment, the polynucleotides may be formulated in crystalline polymeric systems. Crystalline polymeric systems are polymers with crystalline moieties and/or terminal units comprising crystalline moieties. Non-limiting examples of polymers with crystalline moieties and/or terminal units comprising crystalline moieties termed “CYC polymers,” crystalline polymer systems and methods of making such polymers and systems are described in U.S. Pat. No. 8,524,259, the contents of which are herein incorporated by reference in its entirety.

### Phosphatidylserine (PS)

[0629] In one embodiment, the tolerogenic compositions and/or polynucleotides of the invention may comprise phophatidylserine (PS). PS is an anionic phospholipid which is restricted to the inner surface of the plasma membrane. While not wishing to be bound by theory, PS translocates to the cell surface during early apoptosis where it severs as a marker for rapid uptake by phagocytes. PS is an inner surface plasma membrane phospholipid that translocates to the cell surface during early apoptosis where it serves as a marker for rapid uptake by phagocytes and immature dendritic cells. Several studies have shown that apoptotic cells inhibit dendritic cell maturation, thereby preventing autoimmunity (Williams et al., Immunology, 2007, Vol. 124, Pages 89-101, Stuart et al, Journal of Immunology, 2002, Vol. 168, Pages 1627-1635; the contents of each of which are herein incorporated by reference in their entirety), and PS may play a critical role in this process by inhibiting maturation and self-antigen presentation of dendritic cells (Wallet et al, Clinical Medicine & Research, 2005, Vol. 3, Pages 166-175; the contents of which are herein incorporated by reference in its entirety). PS inhibits the expression of MHC, and the expression of molecules associated with maturation of dendritic cells and co-stimulatory molecules, the secretion of IL-12p70, and the ability to activate CD4 and CD8 T cells by dendritic cells (Kim et al. Immunity, 2004 Vol. 21, Pages 643-653, Chen et al, Journal of Immunology, 2004, Vol. 173, Pages 2985-2994, Doffek et al, Molecular Immunology, 2011, Vol. 48, Pages 1771-1777, Wallet et al, Clinical Medicine & Research, 2005, Vol. 3, Pages 166-175; the contents of each of which are herein incorporated by reference in their entirety). Moreover, as described by Gaitonde et al., FVIII complexed with PS significantly reduced the development of antibody response against FVIII in Hemophilia A mice, concurrent with an increase in number of Treg, suggesting the involvement of Tregs in PS-mediated hypo-responsiveness. (Journal of Biological Chemistry, 2013, Vol 288, Pages 17051-17056; the contents of which are herein incorporated by reference in its entirety).

[0630] In one embodiment, the tolerogenic composition and/or polynucleotides of the invention may comprise a phophatidylserine (PS) and may inhibit the activation of dendritic cells (DCs) and may reduce adaptive immunity.

[0631] In another embodiment, the tolerogenic compositions and/or polynucleotides of the invention can be formulated in a liposome, lipid nanoparticle and/or polymer which comprises a phosphatidylserine (PS) to modulate adaptive immune responses.

[0632] In one embodiment, any of the formulations described herein may comprise phosphatidyleserine (PS) and at least one polynucleotide described herein.

[0633] In one embodiment, any of the tolerogenic compositions described herein may be co-administered with phosphatidyleserine (PS).

[0634] In one embodiment, any of the tolerogenic compositions described herein may be co-formulated with phosphatidyleserine (PS).

### Excipients

[0635] Pharmaceutical formulations may additionally comprise a pharmaceutically acceptable excipient, which, as used herein, includes, but are not limited to, any and all solvents, dispersion media, diluents, or other liquid vehicles, dispersion or suspension aids, surface active agents, isotonic agents, thickening or emulsifying agents, preservatives, solid binders, lubricants, flavoring agents, stabilizers, antioxidants, osmolality adjusting agents, pH adjusting agents and the like, as suited to the particular dosage form desired. Various excipients for formulating pharmaceutical compositions and techniques for preparing the composition are known in the art (see Remington: The Science and Practice of Pharmacy, 21^{st} Edition, A. R. Gennaro (Lippincott, Williams & Wilkins, Baltimore, Md., 2006; incorporated herein by reference in its entirety). The use of a conventional excipient medium may be contemplated within the scope of the present disclosure, except insofar as any conventional excipient medium is incompatible with a substance or its derivatives, such as by producing any undesirable biological effect or otherwise interacting in a deleterious manner with any other component(s) of the pharmaceutical composition, its use is contemplated to be within the scope of this invention.

[0636] In some embodiments, a pharmaceutically acceptable excipient may be at least 95%, at least 96%, at least 97%, at least 98%, at least 99%, or 100% pure. In some embodiments, an excipient is approved for use for humans and for veterinary use. In some embodiments, an excipient may be approved by United States Food and Drug Administration. In some embodiments, an excipient may be of pharmaceutical grade. In some embodiments, an excipient may meet the standards of the United States Pharmacopoeia (USP), the European Pharmacopoeia (EP), the British Pharmacopoeia, and/or the International Pharmacopoeia.

[0637] Pharmaceutically acceptable excipients used in the manufacture of pharmaceutical compositions include, but are not limited to, inert diluents, dispersing and/or granulating agents, surface active agents and/or emulsifiers, disintegrating agents, binding agents, preservatives, buffering agents, lubricating agents, and/or oils. Such excipients may optionally be included in pharmaceutical compositions. The composition may also include excipients such as cocoa butter and suppository waxes, coloring agents, coating agents, sweetening, flavoring, and/or perfuming agents.

[0638] Exemplary diluents include, but are not limited to, calcium carbonate, sodium carbonate, calcium phosphate, dicalcium phosphate, calcium sulfate, calcium hydrogen phosphate, sodium phosphate lactose, sucrose, cellulose, microcrystalline cellulose, kaolin, mannitol, sorbitol, inositol, sodium chloride, dry starch, cornstarch, powdered sugar, etc., and/or combinations thereof.

[0639] Exemplary granulating and/or dispersing agents include, but are not limited to, potato starch, corn starch, tapioca starch, sodium starch glycolate, clays, alginic acid, guar gum, citrus pulp, agar, bentonite, cellulose and wood products, natural sponge, cation-exchange resins, calcium carbonate, silicates, sodium carbonate, cross-linked poly(vinyl-pyrrolidone) (crospovidone), sodium carboxymethyl starch (sodium starch glycolate), carboxymethyl cellulose, cross-linked sodium carboxymethyl cellulose (croscarmellose), methylcellulose, pregelatinized starch (starch 1500), microcrystalline starch, water insoluble starch, calcium carboxymethyl cellulose, magnesium aluminum silicate (VEEGUM®), sodium lauryl sulfate, quaternary ammonium compounds, etc., and/or combinations thereof.

[0640] Exemplary surface active agents and/or emulsifiers include, but are not limited to, natural emulsifiers (e.g. acacia, agar, alginic acid, sodium alginate, tragacanth, chondrux, cholesterol, xanthan, pectin, gelatin, egg yolk, casein, wool fat, cholesterol, wax, and lecithin), colloidal clays (e.g. bentonite [aluminum silicate] and VEEGUM® [magnesium aluminum silicate]), long chain amino acid derivatives, high molecular weight alcohols (e.g. stearyl alcohol, cetyl alcohol, oleyl alcohol, triacetin monostearate, ethylene glycol distearate, glyceryl monostearate, and propylene glycol monostearate, polyvinyl alcohol), carbomers (e.g. carboxy polymethylene, polyacrylic acid, acrylic acid polymer, and carboxyvinyl polymer), carrageenan, cellulosic derivatives (e.g. carboxymethylcellulose sodium, powdered cellulose, hydroxymethyl cellulose, hydroxypropyl cellulose, hydroxypropyl methylcellulose, methylcellulose), sorbitan fatty acid esters (e.g. polyoxyethylene sorbitan monolaurate [TWEEN®20], polyoxyethylene sorbitan [TWEEN®60], polyoxyethylene sorbitan monooleate [TWEEN®80], sorbitan monopalmitate [SPAN®40], sorbitan monostearate [SPAN®60], sorbitan tristearate [SPAN®65], glyceryl monooleate, sorbitan monooleate [SPAN®80]), polyoxyethylene esters (e.g. polyoxyethylene monostearate [MYRJ®45], polyoxyethylene hydrogenated castor oil, polyethoxylated castor oil, polyoxymethylene stearate, and SOLUTOL®), sucrose fatty acid esters, polyethylene glycol fatty acid esters (e.g. CREMOPHOR®), polyoxyethylene ethers, (e.g. polyoxyethylene lauryl ether [BRIJ® 30]), poly(vinyl-pyrrolidone), diethylene glycol monolaurate, triethanolamine oleate, sodium oleate, potassium oleate, ethyl oleate, oleic acid, ethyl laurate, sodium lauryl sulfate, PLUORINC®F 68, POLOXAMER® 188, cetrimonium bromide, cetylpyridinium chloride, benzalkonium chloride, docusate sodium, etc. and/or combinations thereof.

[0641] Exemplary binding agents include, but are not limited to, starch (e.g. cornstarch and starch paste); gelatin; sugars (e.g. sucrose, glucose, dextrose, dextrin, molasses, lactose, lactitol, mannitol); amino acids (e.g., glycine); natural and synthetic gums (e.g. acacia, sodium alginate, extract of Irish moss, panwar gum, ghatti gum, mucilage of isapol husks, carboxymethylcellulose, methylcellulose, ethylcellulose, hydroxyethylcellulose, hydroxypropyl cellulose, hydroxypropyl methylcellulose, microcrystalline cellulose, cellulose acetate, poly(vinyl-pyrrolidone), magnesium aluminum silicate (VEEGUM®), and larch arabogalactan); alginates; polyethylene oxide; polyethylene glycol; inorganic calcium salts; silicic acid; polymethacrylates; waxes; water; alcohol; etc.; and combinations thereof.

[0642] Exemplary preservatives may include, but are not limited to, antioxidants, chelating agents, antimicrobial preservatives, antifungal preservatives, alcohol preservatives, acidic preservatives, and/or other preservatives. Oxidation is a potential degradation pathway for mRNA, especially for liquid mRNA formulations. In order to prevent oxidation, antioxidants can be added to the formulation. Exemplary antioxidants include, but are not limited to, alpha tocopherol, ascorbic acid, acorbyl palmitate, benzyl alcohol, butylated hydroxyanisole, EDTA, m-cresol, methionine, butylated hydroxytoluene, monothioglycerol, potassium metabisulfite, propionic acid, propyl gallate, sodium ascorbate, sodium bisulfite, sodium metabisulfite, thioglycerol and/or sodium sulfite. Exemplary chelating agents include ethylenediaminetetraacetic acid (EDTA), citric acid monohydrate, disodium edetate, dipotassium edetate, edetic acid, fumaric acid, malic acid, phosphoric acid, sodium edetate, tartaric acid, and/or trisodium edetate. Exemplary antimicrobial preservatives include, but are not limited to, benzalkonium chloride, benzethonium chloride, benzyl alcohol, bronopol, cetrimide, cetylpyridinium chloride, chlorhexidine, chlorobutanol, chlorocresol, chloroxylenol, cresol, ethyl alcohol, glycerin, hexetidine, imidurea, phenol, phenoxyethanol, phenylethyl alcohol, phenylmercuric nitrate, propylene glycol, and/or thimerosal. Exemplary antifungal preservatives include, but are not limited to, butyl paraben, methyl paraben, ethyl paraben, propyl paraben, benzoic acid, hydroxybenzoic acid, potassium benzoate, potassium sorbate, sodium benzoate, sodium propionate, and/or sorbic acid. Exemplary alcohol preservatives include, but are not limited to, ethanol, polyethylene glycol, phenol, phenolic compounds, bisphenol, chlorobutanol, hydroxybenzoate, and/or phenylethyl alcohol. Exemplary acidic preservatives include, but are not limited to, vitamin A, vitamin C, vitamin E, beta-carotene, citric acid, acetic acid, dehydroacetic acid, ascorbic acid, sorbic acid, and/or phytic acid. Other preservatives include, but are not limited to, tocopherol, tocopherol acetate, deteroxime mesylate, cetrimide, butylated hydroxyanisol (BHA), butylated hydroxytoluened (BHT), ethylenediamine, sodium lauryl sulfate (SLS), sodium lauryl ether sulfate (SLES), sodium bisulfite, sodium metabisulfite, potassium sulfite, potassium metabisulfite, GLYDANT PLUS®, PHENONIP®, methylparaben, GERMALL®115, GERMABEN®II, NEOLONE™, KATHON™, and/or EUXYL®.

[0643] In some embodiments, the pH of polynucleotide solutions are maintained between pH 5 and pH 8 to improve stability. Exemplary buffers to control pH may include, but are not limited to sodium phosphate, sodium citrate, sodium succinate, histidine (or histidine-HCl), sodium carbonate, and/or sodium malate. In another embodiment, the exemplary buffers listed above may be used with additional monovalent counterions (including, but not limited to potassium). Divalent cations may also be used as buffer counterions; however, these are not preferred due to complex formation and/or mRNA degradation.

[0644] Exemplary buffering agents may also include, but are not limited to, citrate buffer solutions, acetate buffer solutions, phosphate buffer solutions, ammonium chloride, calcium carbonate, calcium chloride, calcium citrate, calcium glubionate, calcium gluceptate, calcium gluconate, D-gluconic acid, calcium glycerophosphate, calcium lactate, propanoic acid, calcium levulinate, pentanoic acid, dibasic calcium phosphate, phosphoric acid, tribasic calcium phosphate, calcium hydroxide phosphate, potassium acetate, potassium chloride, potassium gluconate, potassium mixtures, dibasic potassium phosphate, monobasic potassium phosphate, potassium phosphate mixtures, sodium acetate, sodium bicarbonate, sodium chloride, sodium citrate, sodium lactate, dibasic sodium phosphate, monobasic sodium phosphate, sodium phosphate mixtures, tromethamine, magnesium hydroxide, aluminum hydroxide, alginic acid, pyrogen-free water, isotonic saline, Ringer's solution, ethyl alcohol, etc., and/or combinations thereof.

[0645] Exemplary lubricating agents include, but are not limited to, magnesium stearate, calcium stearate, stearic acid, silica, talc, malt, glyceryl behanate, hydrogenated vegetable oils, polyethylene glycol, sodium benzoate, sodium acetate, sodium chloride, leucine, magnesium lauryl sulfate, sodium lauryl sulfate, etc., and combinations thereof.

[0646] Exemplary oils include, but are not limited to, almond, apricot kernel, avocado, babassu, bergamot, black current seed, borage, cade, camomile, canola, caraway, carnauba, castor, cinnamon, cocoa butter, coconut, cod liver, coffee, corn, cotton seed, emu, eucalyptus, evening primrose, fish, flaxseed, geraniol, gourd, grape seed, hazel nut, hyssop, isopropyl myristate, jojoba, kukui nut, lavandin, lavender, lemon, litsea cubeba, macademia nut, mallow, mango seed, meadowfoam seed, mink, nutmeg, olive, orange, orange roughy, palm, palm kernel, peach kernel, peanut, poppy seed, pumpkin seed, rapeseed, rice bran, rosemary, safflower, sandalwood, sasquana, savoury, sea buckthorn, sesame, shea butter, silicone, soybean, sunflower, tea tree, thistle, tsubaki, vetiver, walnut, and wheat germ oils. Exemplary oils include, but are not limited to, butyl stearate, caprylic triglyceride, capric triglyceride, cyclomethicone, diethyl sebacate, dimethicone 360, isopropyl myristate, mineral oil, octyldodecanol, oleyl alcohol, silicone oil, and/or combinations thereof.

[0647] Excipients such as cocoa butter and suppository waxes, coloring agents, coating agents, sweetening, flavoring, and/or perfuming agents can be present in the composition, according to the judgment of the formulator.

[0648] Exemplary additives include physiologically biocompatible buffers (e.g., trimethylamine hydrochloride), addition of chelants (such as, for example, DTPA or DTPA-bisamide) or calcium chelate complexes (as for example calcium DTPA, CaNaDTPA-bisamide), or, optionally, additions of calcium or sodium salts (for example, calcium chloride, calcium ascorbate, calcium gluconate or calcium lactate). In addition, antioxidants and suspending agents can be used.

Cryoprotectants for mRNA

[0649] In some embodiments, polynucleotide formulations may comprise cyroprotectants. As used herein, there term “cryoprotectant” refers to one or more agent that when combined with a given substance, helps to reduce or eliminate damage to that substance that occurs upon freezing. In some embodiments, cryoprotectants are combined with polynucleotides in order to stabilize them during freezing. Frozen storage of mRNA between −20° C. and −80° C. may be advantageous for long term (e.g. 36 months) stability of polynucleotide. In some embodiments, cryoprotectants are included in polynucleotide formulations to stabilize polynucleotide through freeze/thaw cycles and under frozen storage conditions. Cryoprotectants of the present invention may include, but are not limited to sucrose, trehalose, lactose, glycerol, dextrose, raffinose and/or mannitol. Trehalose is listed by the Food and Drug Administration as being generally regarded as safe (GRAS) and is commonly used in commercial pharmaceutical formulations.

### Bulking Agents

[0650] In some embodiments, polynucleotide formulations may comprise bulking agents. As used herein, ther term “bulking agent” refers to one or more agents included in formulations to impart a desired consistency to the formulation and/or stabilization of formulation components. In some embodiments, bulking agents are included in lyophilized polynucleotide formulations to yield a “pharmaceutically elegant” cake, stabilizing the lyophilized polynucleotides during long term (e.g. 36 month) storage. Bulking agents of the present invention may include, but are not limited to sucrose, trehalose, mannitol, glycine, lactose and/or raffinose. In some embodiments, combinations of cryoprotectants and bulking agents (for example, sucrose/glycine or trehalose/mannitol) may be included to both stabilize polynucleotides during freezing and provide a bulking agent for lyophilization.

[0651] Non-limiting examples of formulations and methods for formulating the polynucleotides of the present invention are also provided in International Publication No WO2013090648 filed Dec. 14, 2012, the contents of which are incorporated herein by reference in their entirety.

### Inactive Ingredients

[0652] In some embodiments, polynucleotide formulations may comprise at least one excipient which is an inactive ingredient. As used herein, ther term “inactive ingredient” refers to one or more inactive agents included in formulations. In some embodiments, all, none or some of the inactive ingredients which may be used in the formulations of the present invention may be approved by the US Food and Drug Administration (FDA). A non-exhaustive list of inactive ingredients and the routes of administration the inactive ingredients may be formulated in are described in 4 of co-pending International Publication No. WO2014152211 (Attorney Docket No. M030).

### Delivery

[0653] The present disclosure encompasses the delivery of polynucleotides for any of therapeutic, pharmaceutical, diagnostic or imaging by any appropriate route taking into consideration likely advances in the sciences of drug delivery. Delivery may be naked or formulated.

### Naked Delivery

[0654] The polynucleotides of the present invention may be delivered to a cell naked. As used herein in, “naked” refers to delivering polynucleotides free from agents which promote transfection. For example, the polynucleotides delivered to the cell may contain no modifications. The naked polynucleotides may be delivered to the cell using routes of administration known in the art and described herein.

### Formulated Delivery

[0655] The polynucleotides of the present invention may be formulated, using the methods described herein. The formulations may contain polynucleotides which may be modified and/or unmodified. The formulations may further include, but are not limited to, cell penetration agents, a pharmaceutically acceptable carrier, a delivery agent, a bioerodible or biocompatible polymer, a solvent, and a sustained-release delivery depot. The formulated polynucleotides may be delivered to the cell using routes of administration known in the art and described herein.

[0656] The compositions may also be formulated for direct delivery to an organ or tissue in any of several ways in the art including, but not limited to, direct soaking or bathing, via a catheter, by gels, powder, ointments, creams, gels, lotions, and/or drops, by using substrates such as fabric or biodegradable materials coated or impregnated with the compositions, and the like.

### Administration

[0657] The polynucleotides of the present invention may be administered by any route which results in a therapeutically effective outcome. These include, but are not limited to enteral (into the intestine), gastroenteral, epidural (into the dura matter), oral (by way of the mouth), transdermal, peridural, intracerebral (into the cerebrum), intracerebroventricular (into the cerebral ventricles), epicutaneous (application onto the skin), intradermal, (into the skin itself), subcutaneous (under the skin), nasal administration (through the nose), intravenous (into a vein), intravenous bolus, intravenous drip, intraarterial (into an artery), intramuscular (into a muscle), intracardiac (into the heart), intraosseous infusion (into the bone marrow), intrathecal (into the spinal canal), intraperitoneal, (infusion or injection into the peritoneum), intravesical infusion, intravitreal, (through the eye), intracavernous injection (into a pathologic cavity) intracavitary (into the base of the penis), intravaginal administration, intrauterine, extra-amniotic administration, transdermal (diffusion through the intact skin for systemic distribution), transmucosal (diffusion through a mucous membrane), transvaginal, insufflation (snorting), sublingual, sublabial, enema, eye drops (onto the conjunctiva), in ear drops, auricular (in or by way of the ear), buccal (directed toward the cheek), conjunctival, cutaneous, dental (to a tooth or teeth), electro-osmosis, endocervical, endosinusial, endotracheal, extracorporeal, hemodialysis, infiltration, interstitial, intra-abdominal, intra-amniotic, intra-articular, intrabiliary, intrabronchial, intrabursal, intracartilaginous (within a cartilage), intracaudal (within the cauda equine), intracisternal (within the cisterna magna cerebellomedularis), intracorneal (within the cornea), dental intracornal, intracoronary (within the coronary arteries), intracorporus cavernosum (within the dilatable spaces of the corporus cavernosa of the penis), intradiscal (within a disc), intraductal (within a duct of a gland), intraduodenal (within the duodenum), intradural (within or beneath the dura), intraepidermal (to the epidermis), intraesophageal (to the esophagus), intragastric (within the stomach), intragingival (within the gingivae), intraileal (within the distal portion of the small intestine), intralesional (within or introduced directly to a localized lesion), intraluminal (within a lumen of a tube), intralymphatic (within the lymph), intramedullary (within the marrow cavity of a bone), intrameningeal (within the meninges), intraocular (within the eye), intraovarian (within the ovary), intrapericardial (within the pericardium), intrapleural (within the pleura), intraprostatic (within the prostate gland), intrapulmonary (within the lungs or its bronchi), intrasinal (within the nasal or periorbital sinuses), intraspinal (within the vertebral column), intrasynovial (within the synovial cavity of a joint), intratendinous (within a tendon), intratesticular (within the testicle), intrathecal (within the cerebrospinal fluid at any level of the cerebrospinal axis), intrathoracic (within the thorax), intratubular (within the tubules of an organ), intratumor (within a tumor), intratympanic (within the aurus media), intravascular (within a vessel or vessels), intraventricular (within a ventricle), iontophoresis (by means of electric current where ions of soluble salts migrate into the tissues of the body), irrigation (to bathe or flush open wounds or body cavities), laryngeal (directly upon the larynx), nasogastric (through the nose and into the stomach), occlusive dressing technique (topical route administration which is then covered by a dressing which occludes the area), ophthalmic (to the external eye), oropharyngeal (directly to the mouth and pharynx), parenteral, percutaneous, periarticular, peridural, perineural, periodontal, rectal, respiratory (within the respiratory tract by inhaling orally or nasally for local or systemic effect), retrobulbar (behind the pons or behind the eyeball), intramyocardial (entering the myocardium), soft tissue, subarachnoid, subconjunctival, submucosal, topical, transplacental (through or across the placenta), transtracheal (through the wall of the trachea), transtympanic (across or through the tympanic cavity), ureteral (to the ureter), urethral (to the urethra), vaginal, caudal block, diagnostic, nerve block, biliary perfusion, cardiac perfusion, photopheresis or spinal. In specific embodiments, compositions may be administered in a way which allows them cross the blood-brain barrier, vascular barrier, or other epithelial barrier. In one embodiment, a formulation for a route of administration may include at least one inactive ingredient. Non-limiting examples of routes of administration and inactive ingredients which may be included in formulations for the specific route of administration is shown in Table 9 of International Patent Publication No. WO2015058069, the contents of which are herein incorporated by reference in its entirety. In Table 9 of WO2015058069, “AN” means anesthetic, “CNBLK” means cervical nerve block, “NBLK” means nerve block, “IV” means intravenous, “IM” means intramuscular and “SC” means subcutaneous.

[0658] Non-limiting routes of administration for the polynucleotides of the present invention are described below.

### Parenteral and Injectable Administration

[0659] Liquid dosage forms for parenteral administration include, but are not limited to, pharmaceutically acceptable emulsions, microemulsions, solutions, suspensions, syrups, and/or elixirs. In addition to active ingredients, liquid dosage forms may comprise inert diluents commonly used in the art such as, for example, water or other solvents, solubilizing agents and emulsifiers such as ethyl alcohol, isopropyl alcohol, ethyl carbonate, ethyl acetate, benzyl alcohol, benzyl benzoate, propylene glycol, 1,3-butylene glycol, dimethylformamide, oils (in particular, cottonseed, groundnut, corn, germ, olive, castor, and sesame oils), glycerol, tetrahydrofurfuryl alcohol, polyethylene glycols and fatty acid esters of sorbitan, and mixtures thereof. Besides inert diluents, oral compositions can include adjuvants such as wetting agents, emulsifying and suspending agents, sweetening, flavoring, and/or perfuming agents. In certain embodiments for parenteral administration, compositions are mixed with solubilizing agents such as CREMOPHOR®, alcohols, oils, modified oils, glycols, polysorbates, cyclodextrins, polymers, and/or combinations thereof.

[0660] A pharmaceutical composition for parenteral administration may comprise at least one inactive ingredient. Any or none of the inactive ingredients used may have been approved by the US Food and Drug Administration (FDA). A non-exhaustive list of inactive ingredients for use in pharmaceutical compositions for parenteral administration includes hydrochloric acid, mannitol, nitrogen, sodium acetate, sodium chloride and sodium hydroxide.

[0661] Injectable preparations, for example, sterile injectable aqueous or oleaginous suspensions may be formulated according to the known art using suitable dispersing agents, wetting agents, and/or suspending agents. Sterile injectable preparations may be sterile injectable solutions, suspensions, and/or emulsions in nontoxic parenterally acceptable diluents and/or solvents, for example, as a solution in 1,3-butanediol. Among the acceptable vehicles and solvents that may be employed are water, Ringer's solution, U.S.P., and isotonic sodium chloride solution. Sterile, fixed oils are conventionally employed as a solvent or suspending medium. For this purpose any bland fixed oil can be employed including synthetic mono- or diglycerides. Fatty acids such as oleic acid can be used in the preparation of injectables. The sterile formulation may also comprise adjuvants such as local anesthetics, preservatives and buffering agents.

[0662] Injectable formulations can be sterilized, for example, by filtration through a bacterial-retaining filter, and/or by incorporating sterilizing agents in the form of sterile solid compositions which can be dissolved or dispersed in sterile water or other sterile injectable medium prior to use.

[0663] Injectable formulations may be for direct injection into a region of a tissue, organ and/or subject. As a non-limiting example, a tissue, organ and/or subject may be directly injected a formulation by intramyocardial injection into the ischemic region. (See e.g., Zangi et al. Nature Biotechnology 2013; the contents of which are herein incorporated by reference in its entirety).

[0664] In order to prolong the effect of an active ingredient, it is often desirable to slow the absorption of the active ingredient from subcutaneous or intramuscular injection. This may be accomplished by the use of a liquid suspension of crystalline or amorphous material with poor water solubility. The rate of absorption of the drug then depends upon its rate of dissolution which, in turn, may depend upon crystal size and crystalline form. Alternatively, delayed absorption of a parenterally administered drug form is accomplished by dissolving or suspending the drug in an oil vehicle. Injectable depot forms are made by forming microencapsule matrices of the drug in biodegradable polymers such as polylactide-polyglycolide. Depending upon the ratio of drug to polymer and the nature of the particular polymer employed, the rate of drug release can be controlled. Examples of other biodegradable polymers include poly(orthoesters) and poly(anhydrides). Depot injectable formulations are prepared by entrapping the drug in liposomes or microemulsions which are compatible with body tissues.

### Rectal and Vaginal Administration

[0665] In one embodiment, the polynucleotides described here may be formulated for rectal and vaginal administration by the methods or compositions described in International Patent Publication No. WO2014152211, the contents of which are incorporated by reference in its entirety, such as in paragraphs [000910]-[000913].

### Oral Administration

[0666] Liquid dosage forms for oral administration include, but are not limited to, pharmaceutically acceptable emulsions, microemulsions, solutions, suspensions, syrups, and/or elixirs. In addition to active ingredients, liquid dosage forms may comprise inert diluents and/or excipients commonly used in the art such as, for example, water or other solvents, solubilizing agents and emulsifiers such as ethyl alcohol, isopropyl alcohol, ethyl carbonate, ethyl acetate, benzyl alcohol, benzyl benzoate, propylene glycol, 1,3-butylene glycol, dimethylformamide, oils (in particular, cottonseed, groundnut, corn, germ, olive, castor, and sesame oils), glycerol, tetrahydrofurfuryl alcohol, polyethylene glycols and fatty acid esters of sorbitan, and mixtures thereof. Besides inert diluents, oral compositions can include adjuvants such as wetting agents, emulsifying and suspending agents, sweetening, flavoring, and/or perfuming agents. In certain embodiments for parenteral administration, compositions are mixed with solubilizing agents such as CREMOPHOR®, alcohols, oils, modified oils, glycols, polysorbates, cyclodextrins, polymers, and/or combinations thereof.

[0667] Syrups and elixirs can be formulated with sweetening agents, for example glycerol, propylene glycol, sorbitol, glucose or sucrose. Such formulations can also contain a demulcent, a preservative and flavoring and coloring agents. The pharmaceutical compositions can be in the form of a sterile injectable aqueous or oleaginous suspension. This suspension can be formulated according to the known art using those suitable dispersing or wetting agents and suspending agents that have been mentioned above. The sterile injectable preparation can also be a sterile injectable solution or suspension in a non-toxic parentally acceptable diluent or solvent, for example as a solution in 1,3-butanediol. Among the acceptable vehicles and solvents that can be employed are water, Ringer's solution and isotonic sodium chloride solution. In addition, sterile, fixed oils are conventionally employed as a solvent or suspending medium. For this purpose, any bland fixed oil can be employed including synthetic mono- or diglycerides. In addition, fatty acids such as oleic acid find use in the preparation of injectables.

[0668] Suspensions for oral dosage may contain the active materials in a mixture with excipients suitable for the manufacture of aqueous suspensions. Such excipients may be suspending agents, as a non-limiting example the suspending agents may be sodium carboxymethylcellulose, methylcellulose, hydropropyl-methylcellulose, sodium alginate, polyvinylpyrrolidone, gum tragacanth and gum acacia; dispersing or wetting agents can be a naturally-occurring phosphatide, for example, lecithin, or condensation products of an alkylene oxide with fatty acids, for example polyoxyethylene stearate; or condensation products of ethylene oxide with long chain aliphatic alcohols, for example heptadecaethyleneoxycetanol, or condensation products of ethylene oxide with partial esters derived from fatty acids and a hexitol such as polyoxyethylene sorbitol monooleate, or condensation products of ethylene oxide with partial esters derived from fatty acids and hexitol anhydrides, for example polyethylene sorbitan monooleate. The aqueous suspensions may also contain one or more preservatives, for example ethyl, or n-propyl p-hydroxybenzoate, one or more coloring agents, one or more flavoring agents, and one or more sweetening agents, such as sucrose or saccharin.

[0669] Oily suspensions for oral dosage can be formulated by suspending the active ingredients in a vegetable oil, for example arachis oil, olive oil, sesame oil or coconut oil, or in a mineral oil such as liquid paraffin. The oily suspensions can contain a thickening agent, for example beeswax, hard paraffin or cetyl alcohol. Sweetening agents and flavoring agents can be added to provide palatable oral preparations. These compositions can be preserved by the addition of an anti-oxidant such as ascorbic acid

[0670] The oral dosage may also be in the form of oil-in-water emulsions. The oily phase can be a vegetable oil or a mineral oil or mixtures of these. Suitable emulsifying agents can be naturally-occurring gums, for example gum acacia or gum tragacanth, naturally-occurring phosphatides, for example soy bean, lecithin, and esters or partial esters derived from fatty acids and hexitol, anhydrides, for example sorbitan monooleate, and condensation products of the said partial esters with ethylene oxide, for example polyoxyethylene sorbitan monooleate. The emulsions may also contain sweetening and flavoring agents.

[0671] Solid dosage forms for oral administration include capsules, tablets, pills, powders, and granules. In such solid dosage forms, an active ingredient is mixed with at least one inert, pharmaceutically acceptable excipient such as sodium citrate or dicalcium phosphate and/or fillers or extenders (e.g. starches, lactose, sucrose, glucose, mannitol, and silicic acid), binders (e.g. carboxymethylcellulose, alginates, gelatin, polyvinylpyrrolidinone, sucrose, and acacia), humectants (e.g. glycerol), disintegrating agents (e.g. agar, calcium carbonate, potato or tapioca starch, alginic acid, certain silicates, and sodium carbonate), solution retarding agents (e.g. paraffin), absorption accelerators (e.g. quaternary ammonium compounds), wetting agents (e.g. cetyl alcohol and glycerol monostearate), absorbents (e.g. kaolin and bentonite clay), and lubricants (e.g. talc, calcium stearate, magnesium stearate, solid polyethylene glycols, sodium lauryl sulfate), and mixtures thereof. In the case of capsules, tablets and pills, the dosage form may comprise buffering agents. The solid dosage forms may also dissolve once they come in contact with liquid such as, but not limited to, salvia and bile.

[0672] Compositions intended for oral use can be prepared according to any method known to the art for the manufacture of pharmaceutical compositions and such compositions can contain one or more such sweetening agents, flavoring agents, coloring agents or preservative agents in order to provide pharmaceutically elegant and palatable preparations.

[0673] Solid dosage forms may be uncoated or they can be coated by known techniques. In some cases such coatings can be prepared by known techniques to delay disintegration and absorption in the gastrointestinal tract and thereby provide a sustained action over a longer period. For example, a time delay material such as glyceryl monosterate or glyceryl distearate can be employed.

[0674] Formulations for oral use can also be presented as hard gelatin capsules wherein the active ingredient is mixed with an inert solid diluent, for example, calcium carbonate, calcium phosphate or kaolin, or as soft gelatin capsules wherein the active ingredient is mixed with water or an oil medium, for example peanut oil, liquid paraffin or olive oil.

[0675] Dosage forms for oral delivery may also be chewable or may be suckable (e.g., lozenge form). The chewable dosages forms may be sustained release formulations such as, but not limited to, the sustained release compositions described in International Publication No WO2013082470 and US Publication No US20130142876, each of which is herein incorporated by reference in its entirety. The chewable dosage forms may comprise amphipathic lipids such as, but not limited to, those described in International Publication No WO2013082470 and US Publication No US20130142876, each of which is herein incorporated by reference in its entirety.

### Topical or Transdermal Administration

[0676] In one embodiment, the polynucleotides described here may be formulated for topical or transdermal administration by the methods or compositions described in International Patent Publication No. WO2014152211, the contents of which are incorporated by reference in its entirety, such as in paragraphs [000925]-[000941].

### Depot Administration

[0677] In one embodiment, the polynucleotides described here may be formulated for depot administration by the methods or compositions described in International Patent Publication No. WO2014152211, the contents of which are incorporated by reference in its entirety, such as in paragraphs [000942]-[000948].

### Pulmonary Administration

[0678] In one embodiment, the polynucleotides described here may be formulated for pulmonary administration by the methods or compositions described in International Patent Publication No. WO2014152211, the contents of which are incorporated by reference in its entirety, such as in paragraphs [000949]-[000954].

### Intranasal, Nasal and Buccal Administration

[0679] In one embodiment, the polynucleotides described here may be formulated for intranasal, nasal or buccal administration by the methods or compositions described in International Patent Publication No. WO2014152211, the contents of which are incorporated by reference in its entirety, such as in paragraphs [000955]-[000958].

### Ophthalmic and Auricular (Otic) Administration

[0680] In one embodiment, the polynucleotides described here may be formulated for ophthalmic or auricular (otic) administration by the methods or compositions described in International Patent Publication No. WO2014152211, the contents of which are incorporated by reference in its entirety, such as in paragraphs [000959]-[000965].

### Payload Administration: Detectable Agents and Therapeutic Agents

[0681] The polynucleotides described herein can be used in a number of different scenarios in which delivery of a substance (the “payload”) to a biological target is desired, for example delivery of detectable substances for detection of the target, or delivery of a therapeutic agent. Detection methods can include, but are not limited to, both imaging in vitro and in vivo imaging methods, e.g., immunohistochemistry, bioluminescence imaging (BLI), Magnetic Resonance Imaging (MRI), positron emission tomography (PET), electron microscopy, X-ray computed tomography, Raman imaging, optical coherence tomography, absorption imaging, thermal imaging, fluorescence reflectance imaging, fluorescence microscopy, fluorescence molecular tomographic imaging, nuclear magnetic resonance imaging, X-ray imaging, ultrasound imaging, photoacoustic imaging, lab assays, or in any situation where tagging/staining/imaging is required.

[0682] The polynucleotides can be designed to include both a linker and a payload in any useful orientation. For example, a linker having two ends is used to attach one end to the payload and the other end to the nucleobase, such as at the C-7 or C-8 positions of the deaza-adenosine or deaza-guanosine or to the N-3 or C-5 positions of cytosine or uracil. The polynucleotide of the invention can include more than one payload (e.g., a label and a transcription inhibitor), as well as a cleavable linker. In one embodiment, the modified nucleotide is a modified 7-deaza-adenosine triphosphate, where one end of a cleavable linker is attached to the C7 position of 7-deaza-adenine, the other end of the linker is attached to an inhibitor (e.g., to the C5 position of the nucleobase on a cytidine), and a label (e.g., Cy5) is attached to the center of the linker (see, e.g., compound 1 of A*pCp C5 Parg Capless in FIG. 5 and columns 9 and 10 of U.S. Pat. No. 7,994,304, incorporated herein by reference). Upon incorporation of the modified 7-deaza-adenosine triphosphate to an encoding region, the resulting polynucleotide having a cleavable linker attached to a label and an inhibitor (e.g., a polymerase inhibitor). Upon cleavage of the linker (e.g., with reductive conditions to reduce a linker having a cleavable disulfide moiety), the label and inhibitor are released. Additional linkers and payloads (e.g., therapeutic agents, detectable labels, and cell penetrating payloads) are described herein and in International Publication No. WO2013151666 (Attorney Docket Number M300), the contents of which are incorporated herein by reference in their entirety.

[0683] For example, the polynucleotides described herein can be used in reprogramming induced pluripotent stem cells (iPS cells), which can directly track cells that are transfected compared to total cells in the cluster. In another example, a drug that may be attached to the polynucleotides via a linker and may be fluorescently labeled can be used to track the drug in vivo, e.g. intracellularly. Other examples include, but are not limited to, the use of a polynucleotides in reversible drug delivery into cells.

[0684] The polynucleotides described herein can be used in intracellular targeting of a payload, e.g., detectable or therapeutic agent, to specific organelle. Exemplary intracellular targets can include, but are not limited to, the nuclear localization for advanced mRNA processing, or a nuclear localization sequence (NLS) linked to the mRNA containing an inhibitor.

[0685] In addition, the polynucleotides described herein can be used to deliver therapeutic agents to cells or tissues, e.g., in living animals. For example, the polynucleotides described herein can be used to deliver highly polar chemotherapeutics agents to kill cancer cells. The polynucleotides attached to the therapeutic agent through a linker can facilitate member permeation allowing the therapeutic agent to travel into a cell to reach an intracellular target.

[0686] In one example, the linker is attached at the 2′-position of the ribose ring and/or at the 3′ and/or 5′ position of the polynucleotides (See e.g., International Pub. No. WO2012030683, herein incorporated by reference in its entirety). The linker may be any linker disclosed herein, known in the art and/or disclosed in International Pub. No. WO2012030683, herein incorporated by reference in its entirety.

[0687] In another example, the polynucleotides can be attached to the polynucleotides a viral inhibitory peptide (VIP) through a cleavable linker. The cleavable linker can release the VIP and dye into the cell. In another example, the polynucleotides can be attached through the linker to an ADP-ribosylate, which is responsible for the actions of some bacterial toxins, such as cholera toxin, diphtheria toxin, and pertussis toxin. These toxin proteins are ADP-ribosyltransferases that modify target proteins in human cells. For example, cholera toxin ADP-ribosylates G proteins modifies human cells by causing massive fluid secretion from the lining of the small intestine, which results in life-threatening diarrhea.

[0688] In some embodiments, the payload may be a therapeutic agent such as a cytotoxin, radioactive ion, chemotherapeutic, or other therapeutic agent. A cytotoxin or cytotoxic agent includes any agent that may be detrimental to cells. Examples include, but are not limited to, taxol, cytochalasin B, gramicidin D, ethidium bromide, emetine, mitomycin, etoposide, teniposide, vincristine, vinblastine, colchicine, doxorubicin, daunorubicin, dihydroxyanthracinedione, mitoxantrone, mithramycin, actinomycin D, 1-dehydrotestosterone, glucocorticoids, procaine, tetracaine, lidocaine, propranolol, puromycin, maytansinoids, e.g., maytansinol (see U.S. Pat. No. 5,208,020 incorporated herein in its entirety), rachelmycin (CC-1065, see U.S. Pat. Nos. 5,475,092, 5,585,499, and 5,846,545, all of which are incorporated herein by reference), and analogs or homologs thereof. Radioactive ions include, but are not limited to iodine (e.g., iodine 125 or iodine 131), strontium 89, phosphorous, palladium, cesium, iridium, phosphate, cobalt, yttrium 90, samarium 153, and praseodymium. Other therapeutic agents include, but are not limited to, antimetabolites (e.g., methotrexate, 6-mercaptopurine, 6-thioguanine, cytarabine, 5-fluorouracil decarbazine), alkylating agents (e.g., mechlorethamine, thiotepa chlorambucil, rachelmycin (CC-1065), melphalan, carmustine (BSNU), lomustine (CCNU), cyclophosphamide, busulfan, dibromomannitol, streptozotocin, mitomycin C, and cis-dichlorodiamine platinum (II) (DDP) cisplatin), anthracyclines (e.g., daunorubicin (formerly daunomycin) and doxorubicin), antibiotics (e.g., dactinomycin (formerly actinomycin), bleomycin, mithramycin, and anthramycin (AMC)), and anti-mitotic agents (e.g., vincristine, vinblastine, taxol and maytansinoids).

[0689] In some embodiments, the payload may be a detectable agent, such as various organic small molecules, inorganic compounds, nanoparticles, enzymes or enzyme substrates, fluorescent materials, luminescent materials (e.g., luminol), bioluminescent materials (e.g., luciferase, luciferin, and aequorin), chemiluminescent materials, radioactive materials (e.g., ¹⁸F, ⁶⁷Ga, ^{81m}Kr, ⁸²Rb, ¹¹¹In, ¹²³I, ¹³³Xe, ²⁰¹Tl, ¹²⁵I, ³⁵S, ¹⁴C, ³H, or ^{99m}Tc (e.g., as pertechnetate (technetate(VII), TcO₄⁻)), and contrast agents (e.g., gold (e.g., gold nanoparticles), gadolinium (e.g., chelated Gd), iron oxides (e.g., superparamagnetic iron oxide (SPIO), monocrystalline iron oxide nanoparticles (MIONs), and ultrasmall superparamagnetic iron oxide (USPIO)), manganese chelates (e.g., Mn-DPDP), barium sulfate, iodinated contrast media (iohexol), microbubbles, or perfluorocarbons). Such optically-detectable labels include for example, without limitation, 4-acetamido-4′-isothiocyanatostilbene-2,2′disulfonic acid; acridine and derivatives (e.g., acridine and acridine isothiocyanate); 5-(2′-aminoethyl)aminonaphthalene-1-sulfonic acid (EDANS); 4-amino-N-[3-vinylsulfonyl)phenyl]naphthalimide-3,5 disulfonate; N-(4-anilino-1-naphthyl)maleimide; anthranilamide; BODIPY; Brilliant Yellow; coumarin and derivatives (e.g., coumarin, 7-amino-4-methylcoumarin (AMC, Coumarin 120), and 7-amino-4-trifluoromethylcoumarin (Coumarin 151)); cyanine dyes; cyanosine; 4′,6-diaminidino-2-phenylindole (DAPI); 5′ 5″-dibromopyrogallol-sulfonaphthalein (Bromopyrogallol Red); 7-diethylamino-3-(4′-isothiocyanatophenyl)-4-methylcoumarin; diethylenetriamine pentaacetate; 4,4′-diisothiocyanatodihydro-stilbene-2,2′-disulfonic acid; 4,4′-diisothiocyanatostilbene-2,2′-disulfonic acid; 5-[dimethylamino]-naphthalene-1-sulfonyl chloride (DNS, dansylchloride); 4-dimethylaminophenylazophenyl-4′-isothiocyanate (DABITC); eosin and derivatives (e.g., eosin and eosin isothiocyanate); erythrosin and derivatives (e.g., erythrosin B and erythrosin isothiocyanate); ethidium; fluorescein and derivatives (e.g., 5-carboxyfluorescein (FAM), 5-(4,6-dichlorotriazin-2-yl)aminofluorescein (DTAF), 2′,7′-dimethoxy-4′5′-dichloro-6-carboxyfluorescein, fluorescein, fluorescein isothiocyanate, X-rhodamine-5-(and -6)-isothiocyanate (QFITC or XRITC), and fluorescamine); 2-[2-[3-[[1,3-dihydro-1,1-dimethyl-3-(3-sulfopropyl)-2H-benz[e]indol-2-ylidene]ethylidene]-2-[4-(ethoxycarbonyl)-1-piperazinyl]-1-cyclopenten-1-yl]ethenyl]-1,1-dimethyl-3-(3-sulforpropyl)-1H-benz[e]indolium hydroxide, inner salt, compound with n,n-diethylethanamine(1:1) (IR144); 5-chloro-2-[2-[3-[(5-chloro-3-ethyl-2(3H)-benzothiazol-ylidene)ethylidene]-2-(diphenylamino)-1-cyclopenten-1-yl]ethenyl]-3-ethyl benzothiazolium perchlorate (IR140); Malachite Green isothiocyanate; 4-methylumbelliferone orthocresolphthalein; nitrotyrosine; pararosaniline; Phenol Red; B-phycoerythrin; o-phthaldialdehyde; pyrene and derivatives (e.g., pyrene, pyrene butyrate, and succinimidyl 1-pyrene); butyrate quantum dots; Reactive Red 4 (CIBACRON™ Brilliant Red 3B-A); rhodamine and derivatives (e.g., 6-carboxy-X-rhodamine (ROX), 6-carboxyrhodamine (R6G), lissamine rhodamine B sulfonyl chloride rhodamine (Rhod), rhodamine B, rhodamine 123, rhodamine X isothiocyanate, sulforhodamine B, sulforhodamine 101, sulfonyl chloride derivative of sulforhodamine 101 (Texas Red), N,N,N′,N′tetramethyl-6-carboxyrhodamine (TAMRA) tetramethyl rhodamine, and tetramethyl rhodamine isothiocyanate (TRITC)); riboflavin; rosolic acid; terbium chelate derivatives; Cyanine-3 (Cy3); Cyanine-5 (Cy5); cyanine-5.5 (Cy5.5), Cyanine-7 (Cy7); IRD 700; IRD 800; Alexa 647; La Jolta Blue; phthalo cyanine; and naphthalo cyanine.

[0690] In some embodiments, the detectable agent may be a non-detectable pre-cursor that becomes detectable upon activation (e.g., fluorogenic tetrazine-fluorophore constructs (e.g., tetrazine-BODIPY FL, tetrazine-Oregon Green 488, or tetrazine-BODIPY TMR-X) or enzyme activatable fluorogenic agents (e.g., PROSENSE® (VisEn Medical))). In vitro assays in which the enzyme labeled compositions can be used include, but are not limited to, enzyme linked immunosorbent assays (ELISAs), immunoprecipitation assays, immunofluorescence, enzyme immunoassays (EIA), radioimmunoassays (RIA), and Western blot analysis.

### Combinations

[0691] The polynucleotides may be used in combination with one or more other therapeutic, prophylactic, diagnostic, or imaging agents. By “in combination with,” it is not intended to imply that the agents must be administered at the same time and/or formulated for delivery together, although these methods of delivery are within the scope of the present disclosure. Compositions can be administered concurrently with, prior to, or subsequent to, one or more other desired therapeutics or medical procedures. In general, each agent will be administered at a dose and/or on a time schedule determined for that agent. In some embodiments, the present disclosure encompasses the delivery of pharmaceutical, prophylactic, diagnostic, or imaging compositions in combination with agents that may improve their bioavailability, reduce and/or modify their metabolism, inhibit their excretion, and/or modify their distribution within the body. As a non-limiting example, the polynucleotides may be used in combination with a pharmaceutical agent for the treatment of cancer or to control hyperproliferative cells. In U.S. Pat. No. 7,964,571, herein incorporated by reference in its entirety, a combination therapy for the treatment of solid primary or metastasized tumor is described using a pharmaceutical composition including a DNA plasmid encoding for interleukin-12 with a lipopolymer and also administering at least one anticancer agent or chemotherapeutic. Further, the polynucleotides of the present invention that encodes anti-proliferative molecules may be in a pharmaceutical composition with a lipopolymer (see e.g., U.S. Pub. No. 20110218231, herein incorporated by reference in its entirety, claiming a pharmaceutical composition comprising a DNA plasmid encoding an anti-proliferative molecule and a lipopolymer) which may be administered with at least one chemotherapeutic or anticancer agent (See e.g., the “Combination” Section in U.S. Pat. No. 8,518,907 and International Patent Publication No. WO201218754; the contents of each of which are herein incorporated by reference in its entirety).

[0692] The polynucleotides and pharmaceutical formulations thereof may be administered to a subject alone or used in combination with or include one or more other therapeutic agents, for example, anticancer agents. Thus, combinations of polynucleotides with other anti-cancer or chemotherapeutic agents are within the scope of the invention. Examples of such agents can be found in Cancer Principles and Practice of Oncology by V. T. Devita and S. Hellman (editors), 6^{th} edition (Feb. 15, 2001), Lippincott Williams & Wilkins Publishers. A person of ordinary skill in the art would be able to discern which combinations of agents would be useful based on the particular characteristics of the drugs and the cancer involved. Such anti-cancer agents include, but are not limited to, the following: estrogen receptor modulators, androgen receptor modulators, retinoid receptor modulators, cytotoxic/cytostatic agents, antiproliferative agents, prenyl-protein transferase inhibitors, HMG-CoA reductase inhibitors and other angiogenesis inhibitors, inhibitors of cell proliferation and survival signaling, apoptosis inducing agents and agents that interfere with cell cycle checkpoints. The polynucleotides may also be useful in combination with any therapeutic agent used in the treatment of HCC, for example, but not limitation sorafenib. Polynucleotides may be particularly useful when co-administered with radiation therapy.

[0693] In certain embodiments, the polynucleotides may be useful in combination with known anti-cancer agents including the following: estrogen receptor modulators, androgen receptor modulators, retinoid receptor modulators, cytotoxic agents, antiproliferative agents, prenyl-protein transferase inhibitors, HMG-CoA reductase inhibitors, HIV protease inhibitors, reverse transcriptase inhibitors, and other angiogenesis inhibitors.

[0694] Examples of estrogen receptor modulators, androgen receptor modulators, retinoid receptor modulators, cytotoxic agents, a hypoxia activatable, proteasome inhibitors, microtubule inhibitors/microtubule-stabilising agents, topoisomerase inhibitors, inhibitors of mitotic kinesins, histone deacetylase inhibitors, inhibitors of kinases involved in mitotic progression, antiproliferative agents, monoclonal antibody targeted therapeutic agents, HMG-CoA reductase inhibitors, prenyl-protein transferase inhibitors, angiogenesis inhibitors, therapeutic agents that modulate or inhibit angiogenesis, agents that interfere with cell cycle checkpoints, agents that interfere with receptor tyrosine kinases (RTKs), inhibitors of cell proliferation and survival signaling pathway, apoptosis inducing agents, NSAIDs that are selective COX-2 inhibitors, inhibitors of COX-2, compounds that have been described as specific inhibitors of COX-2, angiogenesis inhibitors, tyrosine kinase inhibitors, compounds other than anti-cancer compounds, inhibitor of inherent multidrug resistance (MDR), anti-emetic agents to treat nausea or emesis, and neurokinin-1 receptor antagonists, are described in co-pending International Patent Publication No. WO2015038892, the contents of which is incorporated by reference in its entirety, such as, but not limited to, in paragraphs [000925]-[000953] and [000954]-[000957].

[0695] Another embodiment of the instant invention is the use of the polynucleotides in combination with gene therapy for the treatment of cancer. For an overview of genetic strategies to treating cancer see Hall et al. (Am J Hum Genet 61:785-789 (1997)) and Kufe et al. (Cancer Medicine, 5th Ed, pp 876-889, BC Decker, Hamilton, 2000). Gene therapy can be used to deliver any tumor suppressing gene. Examples of such genes include, but are not limited to, p53, which can be delivered via recombinant virus-mediated gene transfer (see U.S. Pat. No. 6,069,134, for example), a uPA/uPAR antagonist (“Adenovirus-Mediated Delivery of a uPA/uPAR Antagonist Suppresses Angiogenesis-Dependent Tumor Growth and Dissemination in Mice,” Gene Therapy, August 5(8):1105-13 (1998)), and interferon gamma (J Immunol 164:217-222 (2000)).

[0696] Polynucleotides may also be useful for treating or preventing cancer, including bone cancer, in combination with bisphosphonates (understood to include bisphosphonates, diphosphonates, bisphosphonic acids and diphosphonic acids). Examples of bisphosphonates include but are not limited to: etidronate (Didronel), pamidronate (Aredia), alendronate (Fosamax), risedronate (Actonel), zoledronate (Zometa), ibandronate (Boniva), incadronate or cimadronate, clodronate, EB-1053, minodronate, neridronate, piridronate and tiludronate including any and all pharmaceutically acceptable salts, derivatives, hydrates and mixtures thereof.

[0697] Polynucleotides may also be useful for treating cancer in combination with the following therapeutic agents: abarelix (Plenaxis Depot®); aldesleukin (Prokine®); Aldesleukin (Proleukin®); Alemtuzumabb (Campath®); alitretinoin (Panretin); allopurinol (Zyloprim®); altretamine (Hexylen®); amifostine (Ethyol®); anastrozole (Arimidex®); arsenic trioxide (Trisenox®); asparaginase (Elspar®); azacitidine (Vidaza®); bendamustine hydrochloride (Treanda®); bevacuzimab (Avastin®); bexarotene capsules (Targretin®); bexarotene gel (Targretin®); bleomycin (Blenoxane®); bortezomib (Velcade®); brefeldin A; busulfan intravenous (Busulfex®); busulfan oral (Myleran®); calusterone (Methosarb®); capecitabine (Xeloda®); carboplatin (Paraplatin®); carmustine (BCNU®, BiCNU®); carmustine (Gliadel®); carmustine with Polifeprosan 20 Implant (Gliadel Wafer®); celecoxib (Celebrex); cetuximab (Erbitux®); chlorambucil (Leukeran®); cisplatin (Platinol®); cladribine (Leustatin 2-CdA®); clofarabine (Clolar®); cyclophosphamide (Cytoxan®, Neosar®); cyclophosphamide (Cytoxan Injection®); cyclophosphamide (Cytoxan Tablet®); cytarabine (Cytosar-U®); cytarabine liposomal (DepoCyt); dacarbazine (DTIC-Dome®); dactinomycin, actinomycin D (Cosmegen®); dalteparin sodium injection (Fragmin®); Darbepoetin alfa (Aranesp®); dasatinib (Sprycel®); daunorubicin liposomal (DanuoXome®); daunorubicin, daunomycin (Daunorubicin®); daunorubicin, daunomycin (Cerubidine®); degarelix (Firmagon®); Denileukin diftitox (Ontak®); dexrazoxane (Zinecard®); dexrazoxane hydrochloride (Totect®); didemnin B; 17-DMAG; docetaxel (Taxotere®); doxorubicin (Adriamycin PFS®); doxorubicin (Adriamycin®, Rubex®); doxorubicin (Adriamycin PFS Injection®); doxorubicin liposomal (Doxil®); dromostanolone propionate (Dromostanolone®); dromostanolone propionate (Masterone Injection®); eculizumab injection (Soliris®); Elliott's B Solution (Elliott's B Solution®); eltrombopag (Promacta®); epirubicin (Ellence®); Epoetin alfa (Epogen®); erlotinib (Tarceva®); estramustine (Emcyt®); ethinyl estradiol; etoposide phosphate (Etopophos®); etoposide, VP-16 (Vepesid®); everolimus tablets (Afinitor®); exemestane (Aromasin®); ferumoxytol (Feraheme Injection®); Filgrastim (Neupogen®); floxuridine (intraarterial) (FUDR®); fludarabine (Fludara®); fluorouracil, 5-FU (Adrucil®); fulvestrant (Faslodex®); gefitinib (Iressa®); geldanamycin; gemcitabine (Gemzar®); gemtuzumab ozogamicin (Mylotarg®); goserelin acetate (Zoladex Implant®); goserelin acetate (Zoladex®); histrelin acetate (Histrelin Implant®); hydroxyurea (Hydrea®); Ibritumomab Tiuxetan (Zevalin®); idarubicin (Idamycin®); ifosfamide (IFEX®); imatinib mesylate (Gleevec®); interferon alfa 2a (Roferon A®); Interferon alfa-2b (Intron A®); iobenguane 1123 injection (AdreView®); irinotecan (Camptosar®); ixabepilone (Ixempra®); lapatinib tablets (Tykerb®); lenalidomide (Revlimid®); letrozole (Ferrara®); leucovorin (Wellcovorin®, Leucovorin®); Leuprolide Acetate (Eligard®); levamisole (Ergamisol®); lomustine, CCNU (CeeBU); meclorethamine, nitrogen mustard (Mustargen®); megestrol acetate (Megace®); melphalan, L-PAM (Alkeran®); mercaptopurine, 6-MP (Purinethol®); mesna (Mesnex®); mesna (Mesnex Tabs®); methotrexate (Methotrexate®); methoxsalen (Uvadex®); 8-methoxypsoralen; mitomycin C (Mutamycin®); mitotane (Lysodren®); mitoxantrone (Novantrone®); mitramycin; nandrolone phenpropionate (Durabolin-50); nelarabine (Arranon®); nilotinib (Tasigna®); Nofetumomab (Verluma®); ofatumumab (Arzerra®); Oprelvekin (Neumega®); oxaliplatin (Eloxatin®); paclitaxel (Paxene®); paclitaxel (Taxol®); paclitaxel protein-bound particles (Abraxane®); palifermin (Kepivance®); pamidronate (Aredia®); panitumumab (Vectibix®); pazopanib tablets (Votrienttm®); pegademase (Adagen (Pegademase Bovine)®); pegaspargase (Oncaspar®); Pegfilgrastim (Neulasta®); pemetrexed disodium (Alimta®); pentostatin (Nipent®); pipobroman (Vercyte®); plerixafor (Mozobil®); plicamycin, mithramycin (Mithracin®); porfimer sodium (Photofrin®); pralatrexate injection (Folotyn®); procarbazine (Matulane®); quinacrine (Atabrine®); rapamycin; Rasburicase (Elitek®); raloxifene hydrochloride (Evista®); Rituximab (Rituxan®); romidepsin (Istodax®); romiplostim (Nplate®); sargramostim (Leukine®); Sargramostim (Prokine); sorafenib (Nexavar); streptozocin (Zanosar®); sunitinib maleate (Sutent); talc (Sclerosol); tamoxifen (Nolvadex); temozolomide (Temodar); temsirolimus (Torisel); teniposide, VM-26 (Vumon®); testolactone (Teslac®); thioguanine, 6-TG (Thioguanine®); thiopurine; thiotepa (Thioplex®); topotecan (Hycamtin®); toremifene (Fareston); Tositumomab (Bexxar); Tositumomab/I-131 tositumomab (Bexxar®); trans-retinoic acid; Trastuzumab (Herceptin®); tretinoin, ATRA (Vesanoid®); triethylenemelamine; Uracil Mustard (Uracil Mustard Capsules®); valrubicin (Valstar®); vinblastine (Velban®); vincristine (Oncovin®); vinorelbine (Navelbine®); vorinostat (Zolinza®); wortmannin; and zoledronate (Zometa®).

[0698] The combinations referred to above can conveniently be presented for use in the form of a pharmaceutical formulation and thus pharmaceutical compositions comprising a combination as defined above together with a pharmaceutically acceptable diluent or carrier represent a further aspect of the invention.

[0699] The individual compounds of such combinations can be administered either sequentially or simultaneously in separate or combined pharmaceutical formulations. In one embodiment, the individual compounds will be administered simultaneously in a combined pharmaceutical formulation.

[0700] It will further be appreciated that therapeutically, prophylactically, diagnostically, or imaging active agents utilized in combination may be administered together in a single composition or administered separately in different compositions. In general, it is expected that agents utilized in combination with be utilized at levels that do not exceed the levels at which they are utilized individually. In some embodiments, the levels utilized in combination will be lower than those utilized individually. In one embodiment, the combinations, each or together may be administered according to the split dosing regimens described herein.

### Dosing

[0701] The present invention provides methods comprising administering modified mRNAs and their encoded proteins or complexes in accordance with the invention to a subject in need thereof. Nucleic acids, proteins or complexes, or pharmaceutical, imaging, diagnostic, or prophylactic compositions thereof, may be administered to a subject using any amount and any route of administration effective for preventing, treating, diagnosing, or imaging a disease, disorder, and/or condition (e.g., a disease, disorder, and/or condition relating to working memory deficits). The exact amount required will vary from subject to subject, depending on the species, age, and general condition of the subject, the severity of the disease, the particular composition, its mode of administration, its mode of activity, and the like. Compositions in accordance with the invention are typically formulated in dosage unit form for ease of administration and uniformity of dosage. It will be understood, however, that the total daily usage of the compositions of the present invention may be decided by the attending physician within the scope of sound medical judgment. The specific therapeutically effective, prophylactically effective, or appropriate imaging dose level for any particular patient will depend upon a variety of factors including the disorder being treated and the severity of the disorder; the activity of the specific compound employed; the specific composition employed; the age, body weight, general health, sex and diet of the patient; the time of administration, route of administration, and rate of excretion of the specific compound employed; the duration of the treatment; drugs used in combination or coincidental with the specific compound employed; and like factors well known in the medical arts.

[0702] In certain embodiments, compositions in accordance with the present invention may be administered at dosage levels sufficient to deliver from about 0.0001 mg/kg to about 100 mg/kg, from about 0.001 mg/kg to about 0.05 mg/kg, from about 0.005 mg/kg to about 0.05 mg/kg, from about 0.001 mg/kg to about 0.005 mg/kg, from about 0.05 mg/kg to about 0.5 mg/kg, from about 0.01 mg/kg to about 50 mg/kg, from about 0.1 mg/kg to about 40 mg/kg, from about 0.5 mg/kg to about 30 mg/kg, from about 0.01 mg/kg to about 10 mg/kg, from about 0.1 mg/kg to about 10 mg/kg, or from about 1 mg/kg to about 25 mg/kg, of subject body weight per day, one or more times a day, to obtain the desired therapeutic, diagnostic, prophylactic, or imaging effect (see e.g., the range of unit doses described in International Publication No WO2013078199, herein incorporated by reference in its entirety). The desired dosage may be delivered three times a day, two times a day, once a day, every other day, every third day, every week, every two weeks, every three weeks, or every four weeks. In certain embodiments, the desired dosage may be delivered using multiple administrations (e.g., two, three, four, five, six, seven, eight, nine, ten, eleven, twelve, thirteen, fourteen, or more administrations). When multiple administrations are employed, split dosing regimens such as those described herein may be used.

[0703] In one embodiment, administration of polynucleotides in split-dose regimens may be used to produce higher levels of proteins in mammalian subjects. As used herein, a “split dose” is the division of single unit dose or total daily dose into two or more doses, e.g., two or more administrations of the single unit dose. As used herein, a “single unit dose” is a dose of any therapeutic administered in one dose/at one time/single route/single point of contact, i.e., single administration event. As used herein, a “total daily dose” is an amount given or prescribed in 24 hr period. It may be administered as a single unit dose. In one embodiment, the polynucleotides of the present invention are administered to a subject in split doses. The polynucleotides may be formulated in buffer only or in a formulation described herein.

[0704] In one embodiment, the polynucleotides described herein may be administered using a micro-dosing regimen in order to induce tolerance to the polynucleotide, its excipients or the protein encoded by the polynucleotide. As a non-limiting example, the mirco-dosing regimen may be administered in at least two doses (e.g., at least 2 doses, at least 3 doses, at least 4 doses, at least 5 doses, at least 6 doses, at least 7 doses, at least 8 doses, at least 9 doses, at least 10 doses, at least 11 doses, at least 12 doses, at least 13 doses, at least 14 doses, at least 15 doses, at least 16 doses, at least 17 doses, at least 18 doses, at least 19 doses, at least 20 doses, at least 21 doses, at least 22 doses, at least 23 doses, at least 24 doses, at least 25 doses, at least 26 doses, at least 27 doses, at least 28 doses, at least 29 doses, at least 30 doses, at least 31 doses, at least 32 doses, at least 33 doses, at least 34 doses, at least 35 doses, at least 36 doses, at least 37 doses, at least 38 doses, at least 39 doses, at least 40 doses, at least 41 doses, at least 42 doses, at least 43 doses, at least 44 doses, at least 45 doses, at least 46 doses, at least 47 doses, at least 48 doses, at least 49 doses, at least 50 doses, at least 51 doses, at least 52 doses, at least 53 doses, at least 54 doses, at least 55 doses, at least 56 doses, at least 57 doses, at least 58 doses, at least 59 doses, at least 60 doses, at least 61 doses, at least 62 doses, at least 63 doses, at least 64 doses, at least 65 doses, at least 66 doses, at least 67 doses, at least 68 doses, at least 69 doses, at least 70 doses, at least 71 doses, at least 72 doses, at least 73 doses, at least 74 doses, at least 75 doses, at least 76 doses, at least 77 doses, at least 78 doses, at least 79 doses, at least 80 doses, at least 81 doses, at least 82 doses, at least 83 doses, at least 84 doses, at least 85 doses, at least 86 doses, at least 87 doses, at least 88 doses, at least 89 doses, at least 90 doses, at least 91 doses, at least 92 doses, at least 93 doses, at least 94 doses, at least 95 doses, at least 96 doses, at least 97 doses, at least 98 doses, at least 99 doses, at least 100 doses or more than 100 doses), each of which are at levels as low as one millionth the desired therapeutic dose. As another non-limiting example, the micro-dosing regimen may be staged so the amount of polynucleotide administered may be increased over a pre-determined period of time (e.g., at least 1 hour, at least 2 hours, at least 3 hours, at least 4 hours, at least 5 hours, at least 6 hours, at least 7 hours, at least 8 hours, at least 9 hours, at least 10 hours, at least 11 hours, at least 12 hours, at least 13 hours, at least 14 hours, at least 15 hours, at least 16 hours, at least 17 hours, at least 18 hours, at least 19 hours, at least 20 hours, at least 21 hours, at least 22 hours, at least 23 hours, at least 1 day, at least 36 hours, at least 2 days, at least 3 days, at least 4 days, at least 5 days, at least 6 days, at least 1 week, at least 2 weeks, at least 3 weeks, at least 1 month, at least 2 months, at least 3 months, at least 4 months, at least 5 months, at least 6 months or more than 6 months) and may rise progressively over a period of time until desired effect is achieved (e.g., an efficacy dose) or safety considerations (e.g., toxicity) are rectified.

### Dosage Forms

[0705] A pharmaceutical composition described herein can be formulated into a dosage form described herein, such as a topical, intranasal, intratracheal, or injectable (e.g., intravenous, intraocular, intravitreal, intramuscular, intracardiac, intraperitoneal, and subcutaneous).

### Liquid Dosage Forms

[0706] Liquid dosage forms for parenteral administration are described in co-pending International Patent Publication No. WO2015038892, the contents of which is incorporated by reference in its entirety, such as, but not limited to, in paragraph [0001037].

### Injectable

[0707] Injectable preparations, for example, sterile injectable aqueous or oleaginous suspensions may be formulated according to the known art and may include suitable dispersing agents, wetting agents, and/or suspending agents. Sterile injectable preparations may be sterile injectable solutions, suspensions, and/or emulsions in nontoxic parenterally acceptable diluents and/or solvents, for example, a solution in 1,3-butanediol. Among the acceptable vehicles and solvents that may be employed include, but are not limited to, water, Ringer's solution, U.S.P., and isotonic sodium chloride solution. Sterile, fixed oils are conventionally employed as a solvent or suspending medium. For this purpose any bland fixed oil can be employed including synthetic mono- or diglycerides. Fatty acids such as oleic acid can be used in the preparation of injectables.

Injectable formulations can be sterilized, for example, by filtration through a bacterial-retaining filter, and/or by incorporating sterilizing agents in the form of sterile solid compositions which can be dissolved or dispersed in sterile water or other sterile injectable medium prior to use.
In order to prolong the effect of an active ingredient, it may be desirable to slow the absorption of the active ingredient from subcutaneous or intramuscular injection. This may be accomplished by the use of a liquid suspension of crystalline or amorphous material with poor water solubility. The rate of absorption of the polynucleotides then depends upon its rate of dissolution which, in turn, may depend upon crystal size and crystalline form. Alternatively, delayed absorption of a parenterally administered polynucleotides may be accomplished by dissolving or suspending the polynucleotides in an oil vehicle. Injectable depot forms are made by forming microencapsule matrices of the polynucleotides in biodegradable polymers such as polylactide-polyglycolide. Depending upon the ratio of polynucleotides to polymer and the nature of the particular polymer employed, the rate of polynucleotides release can be controlled. Examples of other biodegradable polymers include, but are not limited to, poly(orthoesters) and poly(anhydrides). Depot injectable formulations may be prepared by entrapping the polynucleotides in liposomes or microemulsions which are compatible with body tissues.

### Pulmonary

[0708] Pulmonary and intranasal formulations for delivery and administration are described in co-pending International Patent Publication No. WO2013151666, the contents of which is incorporated by reference in its entirety, such as, but not limited to, in paragraphs [000766]-[000781].

### Coatings or Shells

[0709] Solid dosage forms of tablets, dragees, capsules, pills, and granules can be prepared with coatings and shells such as enteric coatings and other coatings well known in the pharmaceutical formulating art. They may optionally comprise opacifying agents and can be of a composition that they release the active ingredient(s) only, or preferentially, in a certain part of the intestinal tract, optionally, in a delayed manner. Examples of embedding compositions which can be used include polymeric substances and waxes. Solid compositions of a similar type may be employed as fillers in soft and hard-filled gelatin capsules using such excipients as lactose or milk sugar as well as high molecular weight polyethylene glycols and the like.

### Multi-Dose and Repeat-Dose Administration

[0710] In some embodiments, compounds and/or compositions of the present invention may be administered in two or more doses (referred to herein as “multi-dose administration”). Such doses may comprise the same components or may comprise components not included in a previous dose. Such doses may comprise the same mass and/or volume of components or an altered mass and/or volume of components in comparison to a previous dose. In some embodiments, multi-dose administration may comprise repeat-dose administration. As used herein, the term “repeat-dose administration” refers to two or more doses administered consecutively or within a regimen of repeat doses comprising substantially the same components provided at substantially the same mass and/or volume. In some embodiments, subjects may display a repeat-dose response. As used herein, the term “repeat-dose response” refers to a response in a subject to a repeat-dose that differs from that of another dose administered within a repeat-dose administration regimen. In some embodiments, such a response may be the expression of a protein in response to a repeat-dose comprising mRNA. In such embodiments, protein expression may be elevated in comparison to another dose administered within a repeat-dose administration regimen or protein expression may be reduced in comparison to another dose administered within a repeat-dose administration regimen. Alteration of protein expression may be from about 1% to about 20%, from about 5% to about 50% from about 10% to about 60%, from about 25% to about 75%, from about 40% to about 100% and/or at least 100%. A reduction in expression of mRNA administered as part of a repeat-dose regimen, wherein the level of protein translated from the administered RNA is reduced by more than 40% in comparison to another dose within the repeat-dose regimen is referred to herein as “repeat-dose resistance.”

### Properties of the Pharmaceutical Compositions

[0711] The pharmaceutical compositions described herein can be characterized by one or more of the following properties:

### Bioavailability

[0712] The polynucleotides, when formulated into a composition with a delivery agent as described herein, can exhibit an increase in bioavailability as compared to a composition lacking a delivery agent as described herein. As used herein, the term “bioavailability” refers to the systemic availability of a given amount of polynucleotides administered to a mammal. Bioavailability can be assessed by measuring the area under the curve (AUC) or the maximum serum or plasma concentration (Cₘₐₓ) of the unchanged form of a compound following administration of the compound to a mammal. AUC is a determination of the area under the curve plotting the serum or plasma concentration of a compound along the ordinate (Y-axis) against time along the abscissa (X-axis). Generally, the AUC for a particular compound can be calculated using methods known to those of ordinary skill in the art and as described in G. S. Banker, Modern Pharmaceutics, Drugs and the Pharmaceutical Sciences, v. 72, Marcel Dekker, New York, Inc., 1996, herein incorporated by reference in its entirety.

[0713] The Cₘₐₓ value is the maximum concentration of the compound achieved in the serum or plasma of a mammal following administration of the compound to the mammal. The Cₘₐₓ value of a particular compound can be measured using methods known to those of ordinary skill in the art. The phrases “increasing bioavailability” or “improving the pharmacokinetics,” as used herein mean that the systemic availability of a first polynucleotides, measured as AUC, Cₘₐₓ, or Cₘᵢₙ in a mammal is greater, when co-administered with a delivery agent as described herein, than when such co-administration does not take place. In some embodiments, the bioavailability of the polynucleotides can increase by at least about 2%, at least about 5%, at least about 10%, at least about 15%, at least about 20%, at least about 25%, at least about 30%, at least about 35%, at least about 40%, at least about 45%, at least about 50%, at least about 55%, at least about 60%, at least about 65%, at least about 70%, at least about 75%, at least about 80%, at least about 85%, at least about 90%, at least about 95%, or about 100%.

[0714] In some embodiments, liquid formulations of polynucleotides may have varying in vivo half-life, requiring modulation of doses to yield a therapeutic effect. To address this, in some embodiments of the present invention, polynucleotides formulations may be designed to improve bioavailability and/or therapeutic effect during repeat administrations. Such formulations may enable sustained release of polynucleotides and/or reduce polynucleotide degradation rates by nucleases. In some embodiments, suspension formulations are provided comprising polynucleotides, water immiscible oil depots, surfactants and/or co-surfactants and/or co-solvents. Combinations of oils and surfactants may enable suspension formulation with polynucleotides. Delivery of polynucleotides in a water immiscible depot may be used to improve bioavailability through sustained release of polynucleotides from the depot to the surrounding physiologic environment and/or prevent polynucleotide degradation by nucleases.

[0715] In some embodiments, cationic nanoparticles comprising combinations of divalent and monovalent cations may be formulated with polynucleotides. Such nanoparticles may form spontaneously in solution over a given period (e.g. hours, days, etc.). Such nanoparticles do not form in the presence of divalent cations alone or in the presence of monovalent cations alone. The delivery of polynucleotides in cationic nanoparticles or in one or more depot comprising cationic nanoparticles may improve polynucleotide bioavailability by acting as a long-acting depot and/or reducing the rate of degradation by nucleases.

### Therapeutic Window

[0716] The polynucleotides, when formulated into a composition with a delivery agent as described herein, can exhibit an increase in the therapeutic window of the administered polynucleotides composition as compared to the therapeutic window of the administered polynucleotides composition lacking a delivery agent as described herein. As used herein “therapeutic window” refers to the range of plasma concentrations, or the range of levels of therapeutically active substance at the site of action, with a high probability of eliciting a therapeutic effect. In some embodiments, the therapeutic window of the polynucleotides when co-administered with a delivery agent as described herein can increase by at least about 2%, at least about 5%, at least about 10%, at least about 15%, at least about 20%, at least about 25%, at least about 30%, at least about 35%, at least about 40%, at least about 45%, at least about 50%, at least about 55%, at least about 60%, at least about 65%, at least about 70%, at least about 75%, at least about 80%, at least about 85%, at least about 90%, at least about 95%, or about 100%.

### Volume of Distribution

[0717] The polynucleotides, when formulated into a composition with a delivery agent as described herein, can exhibit an improved volume of distribution (V_{dist}), e.g., reduced or targeted, relative to a composition lacking a delivery agent as described herein. The volume of distribution (V_{dist}) relates the amount of the drug in the body to the concentration of the drug in the blood or plasma. As used herein, the term “volume of distribution” refers to the fluid volume that would be required to contain the total amount of the drug in the body at the same concentration as in the blood or plasma: Vdist equals the amount of drug in the body/concentration of drug in blood or plasma. For example, for a 10 mg dose and a plasma concentration of 10 mg/L, the volume of distribution would be 1 liter. The volume of distribution reflects the extent to which the drug is present in the extravascular tissue. A large volume of distribution reflects the tendency of a compound to bind to the tissue components compared with plasma protein binding. In a clinical setting, Vdist can be used to determine a loading dose to achieve a steady state concentration. In some embodiments, the volume of distribution of the polynucleotides when co-administered with a delivery agent as described herein can decrease at least about 2%, at least about 5%, at least about 10%, at least about 15%, at least about 20%, at least about 25%, at least about 30%, at least about 35%, at least about 40%, at least about 45%, at least about 50%, at least about 55%, at least about 60%, at least about 65%, at least about 70%.

### Biological Effect

[0718] In one embodiment, the biological effect of the modified mRNA delivered to the animals may be categorized by analyzing the protein expression in the animals. The protein expression may be determined from analyzing a biological sample collected from a mammal administered the modified mRNA of the present invention. In one embodiment, the expression protein encoded by the modified mRNA administered to the mammal of at least 50 pg/ml may be preferred. For example, a protein expression of 50-200 pg/ml for the protein encoded by the modified mRNA delivered to the mammal may be seen as a therapeutically effective amount of protein in the mammal.

### Detection of Polynucleotides Acids by Mass Spectrometry

[0719] Mass spectrometry (MS) is an analytical technique that can provide structural and molecular mass/concentration information on molecules after their conversion to ions. The molecules are first ionized to acquire positive or negative charges and then they travel through the mass analyzer to arrive at different areas of the detector according to their mass/charge (m/z) ratio. Methods of detecting polynucleotides are described in co-pending International Patent Publication No. WO2015038892, the contents of which is incorporated by reference in its entirety, such as, but not limited to, in paragraphs [0001055]-[0001067].

### V. Uses of Polynucleotides of the Invention

[0720] The polynucleotides of the present invention are designed, in preferred embodiments, to provide for avoidance or evasion of deleterious bio-responses such as the immune response and/or degradation pathways, overcoming the threshold of expression and/or improving protein production capacity, improved expression rates or translation efficiency, improved drug or protein half life and/or protein concentrations, optimized protein localization, to improve one or more of the stability and/or clearance in tissues, receptor uptake and/or kinetics, cellular access by the compositions, engagement with translational machinery, secretion efficiency (when applicable), accessibility to circulation, and/or modulation of a cell's status, function and/or activity.

### Therapeutics

### Therapeutic Agents

[0721] The polynucleotides of the present invention, such as modified nucleic acids and modified RNAs, and the proteins translated from them described herein can be used as therapeutic or prophylactic agents. They are provided for use in medicine. For example, a polynucleotide described herein can be administered to a subject, wherein the polynucleotides is translated in vivo to produce a therapeutic or prophylactic polypeptide in the subject. Provided are compositions, methods, kits, and reagents for diagnosis, treatment or prevention of a disease or condition in humans and other mammals. The active therapeutic agents of the invention include polynucleotides, cells containing polynucleotides or polypeptides translated from the polynucleotides.

[0722] In certain embodiments, provided herein are combination therapeutics containing one or more polynucleotides containing translatable regions that encode for a protein or proteins that boost a mammalian subject's immunity along with a protein that induces antibody-dependent cellular toxicity. For example, provided herein are therapeutics containing one or more nucleic acids that encode trastuzumab and granulocyte-colony stimulating factor (G-CSF). In particular, such combination therapeutics are useful in Her2+ breast cancer patients who develop induced resistance to trastuzumab. (See, e.g., Albrecht, Immunotherapy. 2(6):795-8 (2010)).

[0723] Provided herein are methods of inducing translation of a recombinant polypeptide in a cell population using the polynucleotides described herein. Such translation can be in vivo, ex vivo, in culture, or in vitro. The cell population is contacted with an effective amount of a composition containing a nucleic acid that has at least one nucleoside modification, and a translatable region encoding the recombinant polypeptide. The population is contacted under conditions such that the nucleic acid is localized into one or more cells of the cell population and the recombinant polypeptide is translated in the cell from the nucleic acid.

[0724] An “effective amount” of the composition is provided based, at least in part, on the target tissue, target cell type, means of administration, physical characteristics of the nucleic acid (e.g., size, and extent of modified nucleosides), and other determinants. In general, an effective amount of the composition provides efficient protein production in the cell, preferably more efficient than a composition containing a corresponding unmodified nucleic acid. Increased efficiency may be demonstrated by increased cell transfection (i.e., the percentage of cells transfected with the nucleic acid), increased protein translation from the nucleic acid, decreased nucleic acid degradation (as demonstrated, e.g., by increased duration of protein translation from a modified nucleic acid), or reduced innate immune response of the host cell.

[0725] Aspects of the invention are directed to methods of inducing in vivo translation of a recombinant polypeptide in a mammalian subject in need thereof. Therein, an effective amount of a composition containing a nucleic acid that has at least one structural or chemical modification and a translatable region encoding the recombinant polypeptide is administered to the subject using the delivery methods described herein. The nucleic acid is provided in an amount and under other conditions such that the nucleic acid is localized into a cell of the subject and the recombinant polypeptide is translated in the cell from the nucleic acid. The cell in which the nucleic acid is localized, or the tissue in which the cell is present, may be targeted with one or more than one rounds of nucleic acid administration.

[0726] In certain embodiments, the administered polynucleotides directs production of one or more recombinant polypeptides that provide a functional activity which is substantially absent in the cell, tissue or organism in which the recombinant polypeptide is translated. For example, the missing functional activity may be enzymatic, structural, or gene regulatory in nature. In related embodiments, the administered polynucleotides directs production of one or more recombinant polypeptides that increases (e.g., synergistically) a functional activity which is present but substantially deficient in the cell in which the recombinant polypeptide is translated.

[0727] In other embodiments, the administered polynucleotides directs production of one or more recombinant polypeptides that replace a polypeptide (or multiple polypeptides) that is substantially absent in the cell in which the recombinant polypeptide is translated. Such absence may be due to genetic mutation of the encoding gene or regulatory pathway thereof. In some embodiments, the recombinant polypeptide increases the level of an endogenous protein in the cell to a desirable level; such an increase may bring the level of the endogenous protein from a subnormal level to a normal level or from a normal level to a super-normal level.

[0728] Alternatively, the recombinant polypeptide functions to antagonize the activity of an endogenous protein present in, on the surface of, or secreted from the cell. Usually, the activity of the endogenous protein is deleterious to the subject; for example, due to mutation of the endogenous protein resulting in altered activity or localization. Additionally, the recombinant polypeptide antagonizes, directly or indirectly, the activity of a biological moiety present in, on the surface of, or secreted from the cell. Examples of antagonized biological moieties include lipids (e.g., cholesterol), a lipoprotein (e.g., low density lipoprotein), a nucleic acid, a carbohydrate, a protein toxin such as shiga and tetanus toxins, or a small molecule toxin such as botulinum, cholera, and diphtheria toxins. Additionally, the antagonized biological molecule may be an endogenous protein that exhibits an undesirable activity, such as a cytotoxic or cytostatic activity.

[0729] The recombinant proteins described herein may be engineered for localization within the cell, potentially within a specific compartment such as the nucleus, or are engineered for secretion from the cell or translocation to the plasma membrane of the cell.

[0730] In some embodiments, modified mRNAs and their encoded polypeptides in accordance with the present invention may be used for treatment of any of a variety of diseases, disorders, and/or conditions, including but not limited to one or more of the following: autoimmune disorders (e.g. diabetes, lupus, multiple sclerosis, psoriasis, rheumatoid arthritis); inflammatory disorders (e.g. arthritis, pelvic inflammatory disease); infectious diseases (e.g. viral infections (e.g., HIV, HCV, RSV), bacterial infections, fungal infections, sepsis); neurological disorders (e.g. Alzheimer's disease, Huntington's disease; autism; Duchenne muscular dystrophy); cardiovascular disorders (e.g. atherosclerosis, hypercholesterolemia, thrombosis, clotting disorders, angiogenic disorders such as macular degeneration); proliferative disorders (e.g. cancer, benign neoplasms); respiratory disorders (e.g. chronic obstructive pulmonary disease); digestive disorders (e.g. inflammatory bowel disease, ulcers); musculoskeletal disorders (e.g. fibromyalgia, arthritis); endocrine, metabolic, and nutritional disorders (e.g. diabetes, osteoporosis); urological disorders (e.g. renal disease); psychological disorders (e.g. depression, schizophrenia); skin disorders (e.g. wounds, eczema); blood and lymphatic disorders (e.g. anemia, hemophilia); etc.

[0731] Diseases characterized by dysfunctional or aberrant protein activity include cystic fibrosis, sickle cell anemia, epidermolysis bullosa, amyotrophic lateral sclerosis, and glucose-6-phosphate dehydrogenase deficiency. The present invention provides a method for treating such conditions or diseases in a subject by introducing nucleic acid or cell-based therapeutics containing the polynucleotides provided herein, wherein the polynucleotides encode for a protein that antagonizes or otherwise overcomes the aberrant protein activity present in the cell of the subject. Specific examples of a dysfunctional protein are the missense mutation variants of the cystic fibrosis transmembrane conductance regulator (CFTR) gene, which produce a dysfunctional protein variant of CFTR protein, which causes cystic fibrosis.

[0732] Diseases characterized by missing (or substantially diminished such that proper (normal or physiological protein function does not occur) protein activity include cystic fibrosis, Niemann-Pick type C, β thalassemia major, Duchenne muscular dystrophy, Hurler Syndrome, Hunter Syndrome, and Hemophilia A. Such proteins may not be present, or are essentially non-functional. The present invention provides a method for treating such conditions or diseases in a subject by introducing nucleic acid or cell-based therapeutics containing the polynucleotides provided herein, wherein the polynucleotides encode for a protein that replaces the protein activity missing from the target cells of the subject. Specific examples of a dysfunctional protein are the nonsense mutation variants of the cystic fibrosis transmembrane conductance regulator (CFTR) gene, which produce a nonfunctional protein variant of CFTR protein, which causes cystic fibrosis.

[0733] Thus, provided are methods of treating cystic fibrosis in a mammalian subject by contacting a cell of the subject with a polynucleotide having a translatable region that encodes a functional CFTR polypeptide, under conditions such that an effective amount of the CTFR polypeptide is present in the cell. Preferred target cells are epithelial, endothelial and mesothelial cells, such as the lung, and methods of administration are determined in view of the target tissue; i.e., for lung delivery, the RNA molecules are formulated for administration by inhalation.

[0734] In another embodiment, the present invention provides a method for treating hyperlipidemia in a subject, by introducing into a cell population of the subject with a modified mRNA molecule encoding Sortilin, a protein recently characterized by genomic studies, thereby ameliorating the hyperlipidemia in a subject. The SORT1 gene encodes a trans-Golgi network (TGN) transmembrane protein called Sortilin. Genetic studies have shown that one of five individuals has a single nucleotide polymorphism, rs12740374, in the 1p13 locus of the SORT1 gene that predisposes them to having low levels of low-density lipoprotein (LDL) and very-low-density lipoprotein (VLDL). Each copy of the minor allele, present in about 30% of people, alters LDL cholesterol by 8 mg/dL, while two copies of the minor allele, present in about 5% of the population, lowers LDL cholesterol 16 mg/dL. Carriers of the minor allele have also been shown to have a 40% decreased risk of myocardial infarction. Functional in vivo studies in mice describes that overexpression of SORT1 in mouse liver tissue led to significantly lower LDL-cholesterol levels, as much as 80% lower, and that silencing SORT1 increased LDL cholesterol approximately 200% (Musunuru K et al. From noncoding variant to phenotype via SORT1 at the 1p13 cholesterol locus. Nature 2010; 466: 714-721).

[0735] In another embodiment, the present invention provides a method for treating hematopoietic disorders, cardiovascular disease, oncology, diabetes, cystic fibrosis, neurological diseases, inborn errors of metabolism, skin and systemic disorders, and blindness. The identity of molecular targets to treat these specific diseases has been described (Templeton ed., Gene and Cell Therapy: Therapeutic Mechanisms and Strategies, 3^{rd} Edition, Bota Raton, Fla.:CRC Press; herein incorporated by reference in its entirety).

[0736] Provided herein, are methods to prevent infection and/or sepsis in a subject at risk of developing infection and/or sepsis, the method comprising administering to a subject in need of such prevention a composition comprising a polynucleotide precursor encoding an anti-microbial polypeptide (e.g., an anti-bacterial polypeptide), or a partially or fully processed form thereof in an amount sufficient to prevent infection and/or sepsis. In certain embodiments, the subject at risk of developing infection and/or sepsis may be a cancer patient. In certain embodiments, the cancer patient may have undergone a conditioning regimen. In some embodiments, the conditioning regiment may include, but is not limited to, chemotherapy, radiation therapy, or both. As a non-limiting example, a polynucleotide can encode Protein C, its zymogen or prepro-protein, the activated form of Protein C (APC) or variants of Protein C which are known in the art. The polynucleotides may be chemically modified and delivered to cells. Non-limiting examples of polypeptides which may be encoded within the chemically modified mRNAs of the present invention include those taught in U.S. Pat. Nos. 7,226,999; 7,498,305; 6,630,138 each of which is incorporated herein by reference in its entirety. These patents teach Protein C like molecules, variants and derivatives, any of which may be encoded within the chemically modified molecules of the present invention.

[0737] Further provided herein, are methods to treat infection and/or sepsis in a subject, the method comprising administering to a subject in need of such treatment a composition comprising a polynucleotide precursor encoding an anti-microbial polypeptide (e.g., an anti-bacterial polypeptide), e.g., an anti-microbial polypeptide described herein, or a partially or fully processed form thereof in an amount sufficient to treat an infection and/or sepsis. In certain embodiments, the subject in need of treatment is a cancer patient. In certain embodiments, the cancer patient has undergone a conditioning regimen. In some embodiments, the conditioning regiment may include, but is not limited to, chemotherapy, radiation therapy, or both.

[0738] In certain embodiments, the subject may exhibits acute or chronic microbial infections (e.g., bacterial infections). In certain embodiments, the subject may have received or may be receiving a therapy. In certain embodiments, the therapy may include, but is not limited to, radiotherapy, chemotherapy, steroids, ultraviolet radiation, or a combination thereof. In certain embodiments, the patient may suffer from a microvascular disorder. In some embodiments, the microvascular disorder may be diabetes. In certain embodiments, the patient may have a wound. In some embodiments, the wound may be an ulcer. In a specific embodiment, the wound may be a diabetic foot ulcer. In certain embodiments, the subject may have one or more burn wounds. In certain embodiments, the administration may be local or systemic. In certain embodiments, the administration may be subcutaneous. In certain embodiments, the administration may be intravenous. In certain embodiments, the administration may be oral. In certain embodiments, the administration may be topical. In certain embodiments, the administration may be by inhalation. In certain embodiments, the administration may be rectal. In certain embodiments, the administration may be vaginal.

### Allergens or Environment Hypersentivity

[0739] In certain embodiments, the polynucleotides of the present invention may be used to treat a subject with an environmental hypersensitivity or allergic reactions. As a non-limiting example, the polynucleotides of the present invention may be used to generate non-human proteins that may play a role in the induction of hypersensitivity or allergic reactions in humans or other mammals. Allergen Specific Immunotherapy (SIT) for respiratory allergic diseases is able to significantly improve symptoms as reduce the need for symptomatic medication, and may also show long-term clinical effects (Jacobsen et al. Clinical and Translational Allergy 2012, 2:8; the contents of which are herein incorporated by reference in its entirety). In one embodiment, the polynucleotides of the present invention may encode proteins or antigens or other triggers for an allergic reaction such as, but are not limited to, plants, grass, tree and other plant pollens, mammal, animal hair or dander, insect, insect parts, excreta or venom, helminthes, non-mammals, birds and reptiles, foods (e.g., legumes, nuts and fish), bacteria, fungi and molds, drugs, metals, wool and latex.

[0740] In one embodiment, the polynucleotides described herein may be administered using a micro-dosing regimen in order to induce tolerance to an allergen or hypersensitivity to the environment. As a non-limiting example, the mirco-dosing regimen may be administered in at least two doses (e.g., at least 2 doses, at least 3 doses, at least 4 doses, at least 5 doses, at least 6 doses, at least 7 doses, at least 8 doses, at least 9 doses, at least 10 doses, at least 11 doses, at least 12 doses, at least 13 doses, at least 14 doses, at least 15 doses, at least 16 doses, at least 17 doses, at least 18 doses, at least 19 doses, at least 20 doses, at least 21 doses, at least 22 doses, at least 23 doses, at least 24 doses, at least 25 doses, at least 26 doses, at least 27 doses, at least 28 doses, at least 29 doses, at least 30 doses, at least 31 doses, at least 32 doses, at least 33 doses, at least 34 doses, at least 35 doses, at least 36 doses, at least 37 doses, at least 38 doses, at least 39 doses, at least 40 doses, at least 41 doses, at least 42 doses, at least 43 doses, at least 44 doses, at least 45 doses, at least 46 doses, at least 47 doses, at least 48 doses, at least 49 doses, at least 50 doses, at least 51 doses, at least 52 doses, at least 53 doses, at least 54 doses, at least 55 doses, at least 56 doses, at least 57 doses, at least 58 doses, at least 59 doses, at least 60 doses, at least 61 doses, at least 62 doses, at least 63 doses, at least 64 doses, at least 65 doses, at least 66 doses, at least 67 doses, at least 68 doses, at least 69 doses, at least 70 doses, at least 71 doses, at least 72 doses, at least 73 doses, at least 74 doses, at least 75 doses, at least 76 doses, at least 77 doses, at least 78 doses, at least 79 doses, at least 80 doses, at least 81 doses, at least 82 doses, at least 83 doses, at least 84 doses, at least 85 doses, at least 86 doses, at least 87 doses, at least 88 doses, at least 89 doses, at least 90 doses, at least 91 doses, at least 92 doses, at least 93 doses, at least 94 doses, at least 95 doses, at least 96 doses, at least 97 doses, at least 98 doses, at least 99 doses, at least 100 doses or more than 100 doses), each of which are at levels as low as one millionth the desired therapeutic dose. As another non-limiting example, the micro-dosing regimen may be staged so the amount of polynucleotide administered may be increased over a pre-determined period of time (e.g., at least 1 hour, at least 2 hours, at least 3 hours, at least 4 hours, at least 5 hours, at least 6 hours, at least 7 hours, at least 8 hours, at least 9 hours, at least 10 hours, at least 11 hours, at least 12 hours, at least 13 hours, at least 14 hours, at least 15 hours, at least 16 hours, at least 17 hours, at least 18 hours, at least 19 hours, at least 20 hours, at least 21 hours, at least 22 hours, at least 23 hours, at least 1 day, at least 36 hours, at least 2 days, at least 3 days, at least 4 days, at least 5 days, at least 6 days, at least 1 week, at least 2 weeks, at least 3 weeks, at least 1 month, at least 2 months, at least 3 months, at least 4 months, at least 5 months, at least 6 months or more than 6 months) and may rise progressively over a period of time until desired effect is achieved (e.g., an efficacy dose) or safety considerations (e.g., toxicity) are rectified.

[0741] In certain embodiments, the polynucleotides may be used to treat a subject with a medical condition that is considered to be wholly or partially related to an exogenous antigen such as, but not limited to, Asthma, Rhino-conjunctivitis, Lupus Erythematosis, Crohn's disease, Ulcerative Colitis, Celiac disease or Type 1 Diabetes Mellitus, multiple sclerosis, cancers. Antigen-specific immunotherapy has been shown useful to induce immune tolerance, in a number of autoimmune disorders, including in diabetes (reviewed in Roep and Peakman, Cold Spring Harb Perspect Med 2012, 2:a007781, Han et al, Am J Transl Res, 2013 Vol 5(4):379-392, and Peakman, F1000 Biology Reports 2012, 4:19; the content of each of which is herein incorporated by reference in its entirety), multiple sclerosis (reviewed in Badawi et al, Clin Immunol., 2012, Vol 144(2), 127-138; the content of which is herein incorporated by reference in its entirety).), and in cancer where antigen from the patient's own tumor can be used as adjuvant therapy to elicit an long-term anti-tumor immune response immune response (Baars et al, British Journal of Cancer, 2002, 86, 1230-1234; the content of which is herein incorporated by reference in its entirety). Dosing may be performed as micro-dosing regimen described herein.

[0742] In certain embodiments, the polynucleotides may be used to treat a subject to induce tolerance to a potential antigen/allergen that is administered in a therapeutic indication. Dosing may be performed as micro-dosing regimen described herein.

[0743] In certain embodiments, to induce tolerance the admin polynucleotides described herein may be administered by a route of administration described herein such as, but not limited to, intradermal, sublingual, intranasal, oral, intramuscular, subcutaneous, intravenous, vaginal and rectal.

[0744] Other aspects of the present disclosure relate to transplantation of cells containing polynucleotides to a mammalian subject. Administration of cells to mammalian subjects is known to those of ordinary skill in the art, and include, but is not limited to, local implantation (e.g., topical or subcutaneous administration), organ delivery or systemic injection (e.g., intravenous injection or inhalation), and the formulation of cells in pharmaceutically acceptable carrier. Such compositions containing polynucleotides can be formulated for administration intramuscularly, transarterially, intraperitoneally, intravenously, intranasally, subcutaneously, endoscopically, transdermally, or intrathecally. In some embodiments, the composition may be formulated for extended release.

[0745] The subject to whom the therapeutic agent may be administered suffers from or may be at risk of developing a disease, disorder, or deleterious condition. Provided are methods of identifying, diagnosing, and classifying subjects on these bases, which may include clinical diagnosis, biomarker levels, genome-wide association studies (GWAS), and other methods known in the art.

[0746] In another embodiment, it may be useful to optimize the expression of a specific polypeptide in a cell line or collection of cell lines of potential interest, particularly a polypeptide of interest such as a protein variant of a reference protein having a known activity. In one embodiment, provided is a method of optimizing expression of a polypeptide of interest in a target cell, by providing a plurality of target cell types, and independently contacting with each of the plurality of target cell types a modified mRNA encoding a polypeptide. Additionally, culture conditions may be altered to increase protein production efficiency. Subsequently, the presence and/or level of the polypeptide of interest in the plurality of target cell types is detected and/or quantitated, allowing for the optimization of a polypeptide of interest's expression by selection of an efficient target cell and cell culture conditions relating thereto. Such methods may be useful when the polypeptide of interest contains one or more post-translational modifications or has substantial tertiary structure, which often complicate efficient protein production.

### Protein Recovery

[0747] The protein of interest may be preferably recovered from the culture medium as a secreted polypeptide, or it can be recovered from host cell lysates if expressed without a secretory signal. It may be necessary to purify the protein of interest from other recombinant proteins and host cell proteins in a way that substantially homogenous preparations of the protein of interest are obtained. The cells and/or particulate cell debris may be removed from the culture medium or lysate. The product of interest may then be purified from contaminant soluble proteins, polypeptides and nucleic acids by, for example, fractionation on immunoaffinity or ion-exchange columns, ethanol precipitation, reverse phase HPLC (RP-HPLC), SEPHADEX® chromatography, chromatography on silica or on a cation exchange resin such as DEAE. Methods of purifying a protein heterologous expressed by a host cell are well known in the art.

[0748] Methods and compositions described herein may be used to produce proteins which are capable of attenuating or blocking the endogenous agonist biological response and/or antagonizing a receptor or signaling molecule in a mammalian subject. For example, IL-12 and IL-23 receptor signaling may be enhanced in chronic autoimmune disorders such as multiple sclerosis and inflammatory diseases such as rheumatoid arthritis, psoriasis, lupus erythematosus, ankylosing spondylitis and Chron's disease (Kikly K, Liu L, Na S, Sedgwich J D (2006) Cur. Opin. Immunol. 18(6): 670-5). In another embodiment, a nucleic acid encodes an antagonist for chemokine receptors. Chemokine receptors CXCR-4 and CCR-5 are required for HIV entry into host cells (Arenzana-Seisdedos F et al, (1996) Nature. October 3; 383 (6599):400).

### Gene Silencing

[0749] The polynucleotides described herein are useful to silence (i.e., prevent or substantially reduce) expression of one or more target genes in a cell population. A polynucleotide encoding a polypeptide of interest capable of directing sequence-specific histone H3 methylation is introduced into the cells in the population under conditions such that the polypeptide is translated and reduces gene transcription of a target gene via histone H3 methylation and subsequent heterochromatin formation. In some embodiments, the silencing mechanism is performed on a cell population present in a mammalian subject. By way of non-limiting example, a useful target gene is a mutated Janus Kinase-2 family member, wherein the mammalian subject expresses the mutant target gene suffers from a myeloproliferative disease resulting from aberrant kinase activity.

[0750] Co-administration of polynucleotides and RNAi agents are also provided herein.

### Modulation of Biological Pathways

[0751] The rapid translation polynucleotides introduced into cells provides a desirable mechanism of modulating target biological pathways. Such modulation includes antagonism or agonism of a given pathway. In one embodiment, a method is provided for antagonizing a biological pathway in a cell by contacting the cell with an effective amount of a composition comprising a polynucleotide encoding a polypeptide of interest, under conditions such that the polynucleotides is localized into the cell and the polypeptide is capable of being translated in the cell from the polynucleotides, wherein the polypeptide inhibits the activity of a polypeptide functional in the biological pathway. Exemplary biological pathways are those defective in an autoimmune or inflammatory disorder such as multiple sclerosis, rheumatoid arthritis, psoriasis, lupus erythematosus, ankylosing spondylitis colitis, or Crohn's disease; in particular, antagonism of the IL-12 and IL-23 signaling pathways are of particular utility. (See Kikly K, Liu L, Na S, Sedgwick J D (2006) Curr. Opin. Immunol. 18 (6): 670-5).

[0752] Further, provided are polynucleotides encoding an antagonist for chemokine receptors; chemokine receptors CXCR-4 and CCR-5 are required for, e.g., HIV entry into host cells (Arenzana-Seisdedos F et al, (1996) Nature. October 3; 383(6599):400).

[0753] Alternatively, provided are methods of agonizing a biological pathway in a cell by contacting the cell with an effective amount of a polynucleotide encoding a recombinant polypeptide under conditions such that the nucleic acid is localized into the cell and the recombinant polypeptide is capable of being translated in the cell from the nucleic acid, and the recombinant polypeptide induces the activity of a polypeptide functional in the biological pathway. Exemplary agonized biological pathways include pathways that modulate cell fate determination. Such agonization is reversible or, alternatively, irreversible.

### Expression of Ligand or Receptor on Cell Surface

[0754] In some aspects and embodiments of the aspects described herein, the polynucleotides described herein can be used to express a ligand or ligand receptor on the surface of a cell (e.g., a homing moiety). A ligand or ligand receptor moiety attached to a cell surface can permit the cell to have a desired biological interaction with a tissue or an agent in vivo. A ligand can be an antibody, an antibody fragment, an aptamer, a peptide, a vitamin, a carbohydrate, a protein or polypeptide, a receptor, e.g., cell-surface receptor, an adhesion molecule, a glycoprotein, a sugar residue, a therapeutic agent, a drug, a glycosaminoglycan, or any combination thereof. For example, a ligand can be an antibody that recognizes a cancer-cell specific antigen, rendering the cell capable of preferentially interacting with tumor cells to permit tumor-specific localization of a modified cell. A ligand can confer the ability of a cell composition to accumulate in a tissue to be treated, since a preferred ligand may be capable of interacting with a target molecule on the external face of a tissue to be treated. Ligands having limited cross-reactivity to other tissues are generally preferred.

[0755] In some cases, a ligand can act as a homing moiety which permits the cell to target to a specific tissue or interact with a specific ligand. Such homing moieties can include, but are not limited to, any member of a specific binding pair, antibodies, monoclonal antibodies, or derivatives or analogs thereof, including without limitation: Fv fragments, single chain Fv (scFv) fragments, Fab′ fragments, F(ab′)2 fragments, single domain antibodies, camelized antibodies and antibody fragments, humanized antibodies and antibody fragments, and multivalent versions of the foregoing; multivalent binding reagents including without limitation: monospecific or bispecific antibodies, such as disulfide stabilized Fv fragments, scFv tandems ((SCFV)2 fragments), diabodies, tribodies or tetrabodies, which typically are covalently linked or otherwise stabilized (i.e., leucine zipper or helix stabilized) scFv fragments; and other homing moieties include for example, aptamers, receptors, and fusion proteins.

[0756] In some embodiments, the homing moiety may be a surface-bound antibody, which can permit tuning of cell targeting specificity. This is especially useful since highly specific antibodies can be raised against an epitope of interest for the desired targeting site. In one embodiment, multiple antibodies are expressed on the surface of a cell, and each antibody can have a different specificity for a desired target. Such approaches can increase the avidity and specificity of homing interactions.

[0757] A skilled artisan can select any homing moiety based on the desired localization or function of the cell, for example an estrogen receptor ligand, such as tamoxifen, can target cells to estrogen-dependent breast cancer cells that have an increased number of estrogen receptors on the cell surface. Other non-limiting examples of ligand/receptor interactions include CCRI (e.g., for treatment of inflamed joint tissues or brain in rheumatoid arthritis, and/or multiple sclerosis), CCR7, CCR8 (e.g., targeting to lymph node tissue), CCR6, CCR9, CCR10 (e.g., to target to intestinal tissue), CCR4, CCR10 (e.g., for targeting to skin), CXCR4 (e.g., for general enhanced transmigration), HCELL (e.g., for treatment of inflammation and inflammatory disorders, bone marrow), Alpha4beta7 (e.g., for intestinal mucosa targeting), VLA-4NCAM-1 (e.g., targeting to endothelium). In general, any receptor involved in targeting (e.g., cancer metastasis) can be harnessed for use in the methods and compositions described herein.

### VI. Kits and Devices

### Kits

[0758] The invention provides a variety of kits for conveniently and/or effectively carrying out methods of the present invention. Typically kits will comprise sufficient amounts and/or numbers of components to allow a user to perform multiple treatments of a subject(s) and/or to perform multiple experiments.

[0759] In one aspect, the present invention provides kits comprising the molecules (polynucleotides) of the invention. In one embodiment, the kit comprises one or more functional antibodies or function fragments thereof.

[0760] Said kits can be for protein production, comprising a first polynucleotides comprising a translatable region. The kit may further comprise packaging and instructions and/or a delivery agent to form a formulation composition. The delivery agent may comprise a saline, a buffered solution, a lipidoid or any delivery agent disclosed herein.

[0761] In one embodiment, the buffer solution may include sodium chloride, calcium chloride, phosphate and/or EDTA. In another embodiment, the buffer solution may include, but is not limited to, saline, saline with 2 mM calcium, 5% sucrose, 5% sucrose with 2 mM calcium, 5% Mannitol, 5% Mannitol with 2 mM calcium, Ringer's lactate, sodium chloride, sodium chloride with 2 mM calcium and mannose (See e.g., U.S. Pub. No. 20120258046; herein incorporated by reference in its entirety). In a further embodiment, the buffer solutions may be precipitated or it may be lyophilized. The amount of each component may be varied to enable consistent, reproducible higher concentration saline or simple buffer formulations. The components may also be varied in order to increase the stability of modified RNA in the buffer solution over a period of time and/or under a variety of conditions. In one aspect, the present invention provides kits for protein production, comprising: a polynucleotide comprising a translatable region, provided in an amount effective to produce a desired amount of a protein encoded by the translatable region when introduced into a target cell; a second polynucleotide comprising an inhibitory nucleic acid, provided in an amount effective to substantially inhibit the innate immune response of the cell; and packaging and instructions.

[0762] In one aspect, the present invention provides kits for protein production, comprising a polynucleotide comprising a translatable region, wherein the polynucleotide exhibits reduced degradation by a cellular nuclease, and packaging and instructions.

[0763] In one aspect, the present invention provides kits for protein production, comprising a polynucleotide comprising a translatable region, wherein the polynucleotide exhibits reduced degradation by a cellular nuclease, and a mammalian cell suitable for translation of the translatable region of the first nucleic acid.

### Devices

[0764] The present invention provides for devices which may incorporate polynucleotides that encode polypeptides of interest. These devices contain in a stable formulation the reagents to synthesize a polynucleotide in a formulation available to be immediately delivered to a subject in need thereof, such as a human patient

[0765] Devices for administration may be employed to deliver the polynucleotides of the present invention according to single, multi- or split-dosing regimens taught herein. Such devices are taught in, for example, International Publication No. WO2013151666 (Attorney Docket Number M300), the contents of which are incorporated herein by reference in their entirety.

[0766] Method and devices known in the art for multi-administration to cells, organs and tissues are contemplated for use in conjunction with the methods and compositions disclosed herein as embodiments of the present invention. These include, for example, those methods and devices having multiple needles, hybrid devices employing for example lumens or catheters as well as devices utilizing heat, electric current or radiation driven mechanisms.

[0767] According to the present invention, these multi-administration devices may be utilized to deliver the single, multi- or split doses contemplated herein. Such devices are taught for example in, International Publication No. WO2013151666 (Attorney Docket Number M300), the contents of which are incorporated herein by reference in their entirety.

[0768] In one embodiment, the polynucleotide is administered subcutaneously or intramuscularly via at least 3 needles to three different, optionally adjacent, sites simultaneously, or within a 60 minutes period (e.g., administration to 4, 5, 6, 7, 8, 9, or 10 sites simultaneously or within a 60 minute period).

Methods and Devices Utilizing Catheters and/or Lumens

[0769] Methods and devices using catheters and lumens may be employed to administer the polynucleotides of the present invention on a single, multi- or split dosing schedule. Such methods and devices are described in International Publication No. WO2013151666 (Attorney Docket Number M300), the contents of which are incorporated herein by reference in their entirety.

### Methods and Devices Utilizing Electrical Current

[0770] Methods and devices utilizing electric current may be employed to deliver the polynucleotides of the present invention according to the single, multi- or split dosing regimens taught herein. Such methods and devices are described in International Publication No. WO2013151666 (Attorney Docket Number M300), the contents of which are incorporated herein by reference in their entirety.

### VII. Definitions

[0771] At various places in the present specification, substituents of compounds of the present disclosure are disclosed in groups or in ranges. It is specifically intended that the present disclosure include each and every individual subcombination of the members of such groups and ranges

[0772] About: As used herein, the term “about” means+/−10% of the recited value.

[0773] Administered in combination: As used herein, the term “administered in combination” or “combined administration” means that two or more agents are administered to a subject at the same time or within an interval such that there may be an overlap of an effect of each agent on the patient. In some embodiments, they are administered within about 60, 30, 15, 10, 5, or 1 minute of one another. In some embodiments, the administrations of the agents are spaced sufficiently closely together such that a combinatorial (e.g., a synergistic) effect is achieved.

[0774] Adjuvant: As used herein, the term “adjuvant” means a substance that enhances a subject's immune response to an antigen.

[0775] Animal: As used herein, the term “animal” refers to any member of the animal kingdom. In some embodiments, “animal” refers to humans at any stage of development. In some embodiments, “animal” refers to non-human animals at any stage of development. In certain embodiments, the non-human animal is a mammal (e.g., a rodent, a mouse, a rat, a rabbit, a monkey, a dog, a cat, a sheep, cattle, a primate, or a pig). In some embodiments, animals include, but are not limited to, mammals, birds, reptiles, amphibians, fish, and worms. In some embodiments, the animal is a transgenic animal, genetically-engineered animal, or a clone.

[0776] Antigen: As used herein, the term “antigen” refers to the substance that binds specifically to the respective antibody. An antigen may originate either from the body, such as cancer antigen used herein, or from the external environment, for instance, from infectious agents.

[0777] Antigens of interest or desired antigens: As used herein, the terms “antigens of interest” or “desired antigens” include those proteins and other biomolecules provided herein that are immunospecifically bound by the antibodies and fragments, mutants, variants, and alterations thereof described herein. Examples of antigens of interest include, but are not limited to, insulin, insulin-like growth factor, hGH, tPA, cytokines, such as interleukins (IL), e.g., IL-1, IL-2, IL-3, IL-4, IL-5, IL-6, IL-7, IL-8, IL-9, IL-10, IL-11, IL-12, IL-13, IL-14, IL-15, IL-16, IL-17, IL-18, interferon (IFN) alpha, IFN beta, IFN gamma, IFN omega or IFN tau, tumor necrosis factor (TNF), such as TNF alpha and TNF beta, TNF gamma, TRAIL; G-CSF, GM-CSF, M-CSF, MCP-1 and VEGF.

[0778] Approximately: As used herein, the term “approximately” or “about,” as applied to one or more values of interest, refers to a value that is similar to a stated reference value. In certain embodiments, the term “approximately” or “about” refers to a range of values that fall within 25%, 20%, 19%, 18%, 17%, 16%, 15%, 14%, 13%, 12%, 11%, 10%, 9%, 8%, 7%, 6%, 5%, 4%, 3%, 2%, 1%, or less in either direction (greater than or less than) of the stated reference value unless otherwise stated or otherwise evident from the context (except where such number would exceed 100% of a possible value).

[0779] Associated with: As used herein, the terms “associated with,” “conjugated,” “linked,” “attached,” and “tethered,” when used with respect to two or more moieties, means that the moieties are physically associated or connected with one another, either directly or via one or more additional moieties that serves as a linking agent, to form a structure that is sufficiently stable so that the moieties remain physically associated under the conditions in which the structure is used, e.g., physiological conditions. An “association” need not be strictly through direct covalent chemical bonding. It may also suggest ionic or hydrogen bonding or a hybridization based connectivity sufficiently stable such that the “associated” entities remain physically associated.

[0780] Bifunctional: As used herein, the term “bifunctional” refers to any substance, molecule or moiety which is capable of or maintains at least two functions. The functions may affect the same outcome or a different outcome. The structure that produces the function may be the same or different. For example, bifunctional modified RNAs of the present invention may encode a cytotoxic peptide (a first function) while those nucleosides which comprise the encoding RNA are, in and of themselves, cytotoxic (second function). In this example, delivery of the bifunctional modified RNA to a cancer cell would produce not only a peptide or protein molecule which may ameliorate or treat the cancer but would also deliver a cytotoxic payload of nucleosides to the cell should degradation, instead of translation of the modified RNA, occur.

[0781] Biocompatible: As used herein, the term “biocompatible” means compatible with living cells, tissues, organs or systems posing little to no risk of injury, toxicity or rejection by the immune system.

[0782] Biodegradable: As used herein, the term “biodegradable” means capable of being broken down into innocuous products by the action of living things.

[0783] Biologically active: As used herein, the phrase “biologically active” refers to a characteristic of any substance that has activity in a biological system and/or organism. For instance, a substance that, when administered to an organism, has a biological effect on that organism, is considered to be biologically active. In particular embodiments, a polynucleotide of the present invention may be considered biologically active if even a portion of the polynucleotides is biologically active or mimics an activity considered biologically relevant.

[0784] Cancer stem cells: As used herein, “cancer stem cells” are cells that can undergo self-renewal and/or abnormal proliferation and differentiation to form a tumor.

[0785] Chimera: As used herein, “chimera” is an entity having two or more incongruous or heterogeneous parts or regions.

[0786] Chimeric polynucleotide: As used herein, “chimeric polynucleotides” are those nucleic acid polymers having portions or regions which differ in size and/or chemical modification pattern, chemical modification position, chemical modification percent or chemical modification population and combinations of the foregoing.

[0787] Compound: As used herein, the term “compound,” is meant to include all stereoisomers, geometric isomers, tautomers, and isotopes of the structures depicted.

[0788] The compounds described herein can be asymmetric (e.g., having one or more stereocenters). All stereoisomers, such as enantiomers and diastereomers, are intended unless otherwise indicated. Compounds of the present disclosure that contain asymmetrically substituted carbon atoms can be isolated in optically active or racemic forms. Methods on how to prepare optically active forms from optically active starting materials are known in the art, such as by resolution of racemic mixtures or by stereoselective synthesis. Many geometric isomers of olefins, C═N double bonds, and the like can also be present in the compounds described herein, and all such stable isomers are contemplated in the present disclosure. Cis and trans geometric isomers of the compounds of the present disclosure are described and may be isolated as a mixture of isomers or as separated isomeric forms.

[0789] Compounds of the present disclosure also include tautomeric forms. Tautomeric forms result from the swapping of a single bond with an adjacent double bond and the concomitant migration of a proton. Tautomeric forms include prototrophic tautomers which are isomeric protonation states having the same empirical formula and total charge. Examples prototrophic tautomers include ketone-enol pairs, amide-imidic acid pairs, lactam-lactim pairs, amide-imidic acid pairs, enamine-imine pairs, and annular forms where a proton can occupy two or more positions of a heterocyclic system, such as, 1H- and 3H-imidazole, 1H-, 2H- and 4H-1,2,4-triazole, 1H- and 2H-isoindole, and 1H- and 2H-pyrazole. Tautomeric forms can be in equilibrium or sterically locked into one form by appropriate substitution.

[0790] Compounds of the present disclosure also include all of the isotopes of the atoms occurring in the intermediate or final compounds. “Isotopes” refers to atoms having the same atomic number but different mass numbers resulting from a different number of neutrons in the nuclei. For example, isotopes of hydrogen include tritium and deuterium.

[0791] The compounds and salts of the present disclosure can be prepared in combination with solvent or water molecules to form solvates and hydrates by routine methods.

[0792] Committed: As used herein, the term “committed” means, when referring to a cell, when the cell is far enough into the differentiation pathway where, under normal circumstances, it will continue to differentiate into a specific cell type or subset of cell type instead of into a different cell type or reverting to a lesser differentiated cell type.

[0793] Conserved: As used herein, the term “conserved” refers to nucleotides or amino acid residues of a polynucleotide sequence or polypeptide sequence, respectively, that are those that occur unaltered in the same position of two or more sequences being compared. Nucleotides or amino acids that are relatively conserved are those that are conserved amongst more related sequences than nucleotides or amino acids appearing elsewhere in the sequences.

[0794] In some embodiments, two or more sequences are said to be “completely conserved” if they are 100% identical to one another. In some embodiments, two or more sequences are said to be “highly conserved” if they are at least 70% identical, at least 80% identical, at least 90% identical, or at least 95% identical to one another. In some embodiments, two or more sequences are said to be “highly conserved” if they are about 70% identical, about 80% identical, about 90% identical, about 95%, about 98%, or about 99% identical to one another. In some embodiments, two or more sequences are said to be “conserved” if they are at least 30% identical, at least 40% identical, at least 50% identical, at least 60% identical, at least 70% identical, at least 80% identical, at least 90% identical, or at least 95% identical to one another. In some embodiments, two or more sequences are said to be “conserved” if they are about 30% identical, about 40% identical, about 50% identical, about 60% identical, about 70% identical, about 80% identical, about 90% identical, about 95% identical, about 98% identical, or about 99% identical to one another. Conservation of sequence may apply to the entire length of a polynucleotide or polypeptide or may apply to a portion, region or feature thereof.

[0795] Controlled Release: As used herein, the term “controlled release” refers to a pharmaceutical composition or compound release profile that conforms to a particular pattern of release to effect a therapeutic outcome.

[0796] Cyclic or Cyclized: As used herein, the term “cyclic” refers to the presence of a continuous loop. Cyclic molecules need not be circular, only joined to form an unbroken chain of subunits. Cyclic molecules such as the engineered RNA or mRNA of the present invention may be single units or multimers or comprise one or more components of a complex or higher order structure.

[0797] Cytostatic: As used herein, “cytostatic” refers to inhibiting, reducing, suppressing the growth, division, or multiplication of a cell (e.g., a mammalian cell (e.g., a human cell)), bacterium, virus, fungus, protozoan, parasite, prion, or a combination thereof.

[0798] Cytotoxic: As used herein, “cytotoxic” refers to killing or causing injurious, toxic, or deadly effect on a cell (e.g., a mammalian cell (e.g., a human cell)), bacterium, virus, fungus, protozoan, parasite, prion, or a combination thereof.

[0799] Delivery: As used herein, “delivery” refers to the act or manner of delivering a compound, substance, entity, moiety, cargo or payload.

[0800] Delivery Agent: As used herein, “delivery agent” refers to any substance which facilitates, at least in part, the in vivo delivery of a polynucleotide to targeted cells.

[0801] Destabilized: As used herein, the term “destable,” “destabilize,” or “destabilizing region” means a region or molecule that is less stable than a starting, wild-type or native form of the same region or molecule.

[0802] Detectable label: As used herein, “detectable label” refers to one or more markers, signals, or moieties which are attached, incorporated or associated with another entity that is readily detected by methods known in the art including radiography, fluorescence, chemiluminescence, enzymatic activity, absorbance and the like. Detectable labels include radioisotopes, fluorophores, chromophores, enzymes, dyes, metal ions, ligands such as biotin, avidin, streptavidin and haptens, quantum dots, and the like. Detectable labels may be located at any position in the peptides or proteins disclosed herein. They may be within the amino acids, the peptides, or proteins, or located at the N- or C-termini.

[0803] Diastereomer: As used herein, the term “diastereomer,” means stereoisomers that are not mirror images of one another and are non-superimposable on one another.

[0804] Digest: As used herein, the term “digest” means to break apart into smaller pieces or components. When referring to polypeptides or proteins, digestion results in the production of peptides.

[0805] Differentiated cell: As used herein, the term “differentiated cell” refers to any somatic cell that is not, in its native form, pluripotent. Differentiated cell also encompasses cells that are partially differentiated.

[0806] Differentiation: As used herein, the term “differentiation factor” refers to a developmental potential altering factor such as a protein, RNA or small molecule that can induce a cell to differentiate to a desired cell-type.

[0807] Differentiate: As used herein, “differentiate” refers to the process where an uncommitted or less committed cell acquires the features of a committed cell.

[0808] Distal: As used herein, the term “distal” means situated away from the center or away from a point or region of interest.

[0809] Dosing regimen: As used herein, a “dosing regimen” is a schedule of administration or physician determined regimen of treatment, prophylaxis, or palliative care.

[0810] Dose splitting factor (DSF)-ratio of PUD of dose split treatment divided by PUD of total daily dose or single unit dose. The value is derived from comparison of dosing regimens groups.

[0811] Enantiomer: As used herein, the term “enantiomer” means each individual optically active form of a compound of the invention, having an optical purity or enantiomeric excess (as determined by methods standard in the art) of at least 80% (i.e., at least 90% of one enantiomer and at most 10% of the other enantiomer), preferably at least 90% and more preferably at least 98%.

[0812] Encapsulate: As used herein, the term “encapsulate” means to enclose, surround or encase.

[0813] Encoded protein cleavage signal: As used herein, “encoded protein cleavage signal” refers to the nucleotide sequence which encodes a protein cleavage signal.

[0814] Engineered: As used herein, embodiments of the invention are “engineered” when they are designed to have a feature or property, whether structural or chemical, that varies from a starting point, wild type or native molecule.

[0815] Effective Amount: As used herein, the term “effective amount” of an agent is that amount sufficient to effect beneficial or desired results, for example, clinical results, and, as such, an “effective amount” depends upon the context in which it is being applied. For example, in the context of administering an agent that treats cancer, an effective amount of an agent is, for example, an amount sufficient to achieve treatment, as defined herein, of cancer, as compared to the response obtained without administration of the agent.

[0816] Exosome: As used herein, “exosome” is a vesicle secreted by mammalian cells or a complex involved in RNA degradation.

[0817] Expression: As used herein, “expression” of a nucleic acid sequence refers to one or more of the following events: (1) production of an RNA template from a DNA sequence (e.g., by transcription); (2) processing of an RNA transcript (e.g., by splicing, editing, 5′ cap formation, and/or 3′ end processing); (3) translation of an RNA into a polypeptide or protein; and (4) post-translational modification of a polypeptide or protein.

[0818] Feature: As used herein, a “feature” refers to a characteristic, a property, or a distinctive element.

[0819] Formulation: As used herein, a “formulation” includes at least a polynucleotide and a delivery agent.

[0820] Fragment: A “fragment,” as used herein, refers to a portion. For example, fragments of proteins may comprise polypeptides obtained by digesting full-length protein isolated from cultured cells.

[0821] Functional: As used herein, a “functional” biological molecule is a biological molecule in a form in which it exhibits a property and/or activity by which it is characterized.

[0822] Homology: As used herein, the term “homology” refers to the overall relatedness between polymeric molecules, e.g. between nucleic acid molecules (e.g. DNA molecules and/or RNA molecules) and/or between polypeptide molecules. In some embodiments, polymeric molecules are considered to be “homologous” to one another if their sequences are at least 25%, 30%, 35%, 40%, 45%, 50%, 55%, 60%, 65%, 70%, 75%, 80%, 85%, 90%, 95%, or 99% identical or similar. The term “homologous” necessarily refers to a comparison between at least two sequences (polynucleotide or polypeptide sequences). In accordance with the invention, two polynucleotide sequences are considered to be homologous if the polypeptides they encode are at least about 50%, 60%, 70%, 80%, 90%, 95%, or even 99% for at least one stretch of at least about 20 amino acids. In some embodiments, homologous polynucleotide sequences are characterized by the ability to encode a stretch of at least 4-5 uniquely specified amino acids. For polynucleotide sequences less than 60 nucleotides in length, homology is determined by the ability to encode a stretch of at least 4-5 uniquely specified amino acids. In accordance with the invention, two protein sequences are considered to be homologous if the proteins are at least about 50%, 60%, 70%, 80%, or 90% identical for at least one stretch of at least about 20 amino acids.

[0823] Identity: As used herein, the term “identity” refers to the overall relatedness between polymeric molecules, e.g., between polynucleotide molecules (e.g. DNA molecules and/or RNA molecules) and/or between polypeptide molecules. Calculation of the percent identity of two polynucleotide sequences, for example, can be performed by aligning the two sequences for optimal comparison purposes (e.g., gaps can be introduced in one or both of a first and a second nucleic acid sequences for optimal alignment and non-identical sequences can be disregarded for comparison purposes). In certain embodiments, the length of a sequence aligned for comparison purposes is at least 30%, at least 40%, at least 50%, at least 60%, at least 70%, at least 80%, at least 90%, at least 95%, or 100% of the length of the reference sequence. The nucleotides at corresponding nucleotide positions are then compared. When a position in the first sequence is occupied by the same nucleotide as the corresponding position in the second sequence, then the molecules are identical at that position. The percent identity between the two sequences is a function of the number of identical positions shared by the sequences, taking into account the number of gaps, and the length of each gap, which needs to be introduced for optimal alignment of the two sequences. The comparison of sequences and determination of percent identity between two sequences can be accomplished using a mathematical algorithm. For example, the percent identity between two nucleotide sequences can be determined using methods such as those described in Computational Molecular Biology, Lesk, A. M., ed., Oxford University Press, New York, 1988; Biocomputing: Informatics and Genome Projects, Smith, D. W., ed., Academic Press, New York, 1993; Sequence Analysis in Molecular Biology, von Heinje, G., Academic Press, 1987; Computer Analysis of Sequence Data, Part I, Griffin, A. M., and Griffin, H. G., eds., Humana Press, New Jersey, 1994; and Sequence Analysis Primer, Gribskov, M. and Devereux, J., eds., M Stockton Press, New York, 1991; each of which is incorporated herein by reference. For example, the percent identity between two nucleotide sequences can be determined using the algorithm of Meyers and Miller (CABIOS, 1989, 4:11-17), which has been incorporated into the ALIGN program (version 2.0) using a PAM120 weight residue table, a gap length penalty of 12 and a gap penalty of 4. The percent identity between two nucleotide sequences can, alternatively, be determined using the GAP program in the GCG software package using an NWSgapdna.CMP matrix. Methods commonly employed to determine percent identity between sequences include, but are not limited to those disclosed in Carillo, H., and Lipman, D., SIAM J Applied Math., 48:1073 (1988); incorporated herein by reference. Techniques for determining identity are codified in publicly available computer programs. Exemplary computer software to determine homology between two sequences include, but are not limited to, GCG program package, Devereux, J., et al., Nucleic Acids Research, 12(1), 387 (1984)), BLASTP, BLASTN, and FASTA Altschul, S. F. et al., J. Molec. Biol., 215, 403 (1990)).

[0824] Infectious Agent: As used herein, the phrase “infectious agent” means an agent capable of producing an infection.

[0825] Inhibit expression of a gene: As used herein, the phrase “inhibit expression of a gene” means to cause a reduction in the amount of an expression product of the gene. The expression product can be an RNA transcribed from the gene (e.g., an mRNA) or a polypeptide translated from an mRNA transcribed from the gene. Typically a reduction in the level of an mRNA results in a reduction in the level of a polypeptide translated therefrom. The level of expression may be determined using standard techniques for measuring mRNA or protein.

[0826] Infectious agent: As used herein, an “infectious agent” refers to any microorganism, virus, infectious substance, or biological product that may be engineered as a result of biotechnology, or any naturally occurring or bioengineered component of any such microorganism, virus, infectious substance, or biological product, can cause emerging and contagious disease, death or other biological malfunction in a human, an animal, a plant or another living organism.

[0827] Influenza: As used herein, “influenza” or “flu” is an infectious disease of birds and mammals caused by RNA viruses of the family Orthomyxoviridae, the influenza viruses.

[0828] Isomer: As used herein, the term “isomer” means any tautomer, stereoisomer, enantiomer, or diastereomer of any compound of the invention. It is recognized that the compounds of the invention can have one or more chiral centers and/or double bonds and, therefore, exist as stereoisomers, such as double-bond isomers (i.e., geometric E/Z isomers) or diastereomers (e.g., enantiomers (i.e., (+) or (−)) or cis/trans isomers). According to the invention, the chemical structures depicted herein, and therefore the compounds of the invention, encompass all of the corresponding stereoisomers, that is, both the stereomerically pure form (e.g., geometrically pure, enantiomerically pure, or diastereomerically pure) and enantiomeric and stereoisomeric mixtures, e.g., racemates. Enantiomeric and stereoisomeric mixtures of compounds of the invention can typically be resolved into their component enantiomers or stereoisomers by well-known methods, such as chiral-phase gas chromatography, chiral-phase high performance liquid chromatography, crystallizing the compound as a chiral salt complex, or crystallizing the compound in a chiral solvent. Enantiomers and stereoisomers can also be obtained from stereomerically or enantiomerically pure intermediates, reagents, and catalysts by well-known asymmetric synthetic methods.

[0829] In vitro: As used herein, the term “in vitro” refers to events that occur in an artificial environment, e.g., in a test tube or reaction vessel, in cell culture, in a Petri dish, etc., rather than within an organism (e.g., animal, plant, or microbe).

[0830] In vivo: As used herein, the term “in vivo” refers to events that occur within an organism (e.g., animal, plant, or microbe or cell or tissue thereof).

[0831] Isolated: As used herein, the term “isolated” refers to a substance or entity that has been separated from at least some of the components with which it was associated (whether in nature or in an experimental setting). Isolated substances may have varying levels of purity in reference to the substances from which they have been associated. Isolated substances and/or entities may be separated from at least about 10%, about 20%, about 30%, about 40%, about 50%, about 60%, about 70%, about 80%, about 90%, or more of the other components with which they were initially associated. In some embodiments, isolated agents are more than about 80%, about 85%, about 90%, about 91%, about 92%, about 93%, about 94%, about 95%, about 96%, about 97%, about 98%, about 99%, or more than about 99% pure. As used herein, a substance is “pure” if it is substantially free of other components. Substantially isolated: By “substantially isolated” is meant that the compound is substantially separated from the environment in which it was formed or detected. Partial separation can include, for example, a composition enriched in the compound of the present disclosure. Substantial separation can include compositions containing at least about 50%, at least about 60%, at least about 70%, at least about 80%, at least about 90%, at least about 95%, at least about 97%, or at least about 99% by weight of the compound of the present disclosure, or salt thereof. Methods for isolating compounds and their salts are routine in the art.

[0832] IVT Polynucleotide: As used herein, an “IVT polynucleotide” is a linear polynucleotide which may be made using only in vitro transcription (IVT) enzymatic synthesis methods.

[0833] Linker: As used herein, a “linker” refers to a group of atoms, e.g., 10-1,000 atoms, and can be comprised of the atoms or groups such as, but not limited to, carbon, amino, alkylamino, oxygen, sulfur, sulfoxide, sulfonyl, carbonyl, and imine. The linker can be attached to a modified nucleoside or nucleotide on the nucleobase or sugar moiety at a first end, and to a payload, e.g., a detectable or therapeutic agent, at a second end. The linker may be of sufficient length as to not interfere with incorporation into a nucleic acid sequence. The linker can be used for any useful purpose, such as to form polynucleotide multimers (e.g., through linkage of two or more chimeric polynucleotides molecules or IVT polynucleotides) or polynucleotides conjugates, as well as to administer a payload, as described herein. Examples of chemical groups that can be incorporated into the linker include, but are not limited to, alkyl, alkenyl, alkynyl, amido, amino, ether, thioether, ester, alkylene, heteroalkylene, aryl, or heterocyclyl, each of which can be optionally substituted, as described herein. Examples of linkers include, but are not limited to, unsaturated alkanes, polyethylene glycols (e.g., ethylene or propylene glycol monomeric units, e.g., diethylene glycol, dipropylene glycol, triethylene glycol, tripropylene glycol, tetraethylene glycol, or tetraethylene glycol), and dextran polymers and derivatives thereof. Other examples include, but are not limited to, cleavable moieties within the linker, such as, for example, a disulfide bond (—S—S—) or an azo bond (—N═N—), which can be cleaved using a reducing agent or photolysis. Non-limiting examples of a selectively cleavable bond include an amido bond can be cleaved for example by the use of tris(2-carboxyethyl)phosphine (TCEP), or other reducing agents, and/or photolysis, as well as an ester bond can be cleaved for example by acidic or basic hydrolysis.

[0834] MicroRNA (miRNA) binding site: As used herein, a microRNA (miRNA) binding site represents a nucleotide location or region of a nucleic acid transcript to which at least the “seed” region of a miRNA binds.

[0835] Modified: As used herein “modified” refers to a changed state or structure of a molecule of the invention. Molecules may be modified in many ways including chemically, structurally, and functionally. In one embodiment, the mRNA molecules of the present invention are modified by the introduction of non-natural nucleosides and/or nucleotides, e.g., as it relates to the natural ribonucleotides A, U, G, and C. Noncanonical nucleotides such as the cap structures are not considered “modified” although they differ from the chemical structure of the A, C, G, U ribonucleotides.

[0836] Mucus: As used herein, “mucus” refers to the natural substance that is viscous and comprises mucin glycoproteins.

[0837] Naturally occurring: As used herein, “naturally occurring” means existing in nature without artificial aid.

[0838] Neutralizing antibody: As used herein, a “neutralizing antibody” refers to an antibody which binds to its antigen and defends a cell from an antigen or infectious agent by neutralizing or abolishing any biological activity it has.

[0839] Non-human vertebrate: As used herein, a “non-human vertebrate” includes all vertebrates except Homo sapiens, including wild and domesticated species. Examples of non-human vertebrates include, but are not limited to, mammals, such as alpaca, banteng, bison, camel, cat, cattle, deer, dog, donkey, gayal, goat, guinea pig, horse, llama, mule, pig, rabbit, reindeer, sheep water buffalo, and yak.

[0840] Off-target: As used herein, “off target” refers to any unintended effect on any one or more target, gene, or cellular transcript.

[0841] Open reading frame: As used herein, “open reading frame” or “ORF” refers to a sequence which does not contain a stop codon in a given reading frame.

[0842] Operably linked: As used herein, the phrase “operably linked” refers to a functional connection between two or more molecules, constructs, transcripts, entities, moieties or the like.

[0843] Optionally substituted: Herein a phrase of the form “optionally substituted X” (e.g., optionally substituted alkyl) is intended to be equivalent to “X, wherein X is optionally substituted” (e.g., “alkyl, wherein said alkyl is optionally substituted”). It is not intended to mean that the feature “X” (e.g. alkyl) per se is optional.

[0844] Part: As used herein, a “part” or “region” of a polynucleotide is defined as any portion of the polynucleotide which is less than the entire length of the polynucleotide.

[0845] Peptide: As used herein, “peptide” is less than or equal to 50 amino acids long, e.g., about 5, 10, 15, 20, 25, 30, 35, 40, 45, or 50 amino acids long.

[0846] Paratope: As used herein, a “paratope” refers to the antigen-binding site of an antibody.

[0847] Patient: As used herein, “patient” refers to a subject who may seek or be in need of treatment, requires treatment, is receiving treatment, will receive treatment, or a subject who is under care by a trained professional for a particular disease or condition.

[0848] Pharmaceutically acceptable: The phrase “pharmaceutically acceptable” is employed herein to refer to those compounds, materials, compositions, and/or dosage forms which are, within the scope of sound medical judgment, suitable for use in contact with the tissues of human beings and animals without excessive toxicity, irritation, allergic response, or other problem or complication, commensurate with a reasonable benefit/risk ratio.

[0849] Pharmaceutically acceptable excipients: The phrase “pharmaceutically acceptable excipient,” as used herein, refers any ingredient other than the compounds described herein (for example, a vehicle capable of suspending or dissolving the active compound) and having the properties of being substantially nontoxic and non-inflammatory in a patient. Excipients may include, for example: antiadherents, antioxidants, binders, coatings, compression aids, disintegrants, dyes (colors), emollients, emulsifiers, fillers (diluents), film formers or coatings, flavors, fragrances, glidants (flow enhancers), lubricants, preservatives, printing inks, sorbents, suspensing or dispersing agents, sweeteners, and waters of hydration. Exemplary excipients include, but are not limited to: butylated hydroxytoluene (BHT), calcium carbonate, calcium phosphate (dibasic), calcium stearate, croscarmellose, crosslinked polyvinyl pyrrolidone, citric acid, crospovidone, cysteine, ethylcellulose, gelatin, hydroxypropyl cellulose, hydroxypropyl methylcellulose, lactose, magnesium stearate, maltitol, mannitol, methionine, methylcellulose, methyl paraben, microcrystalline cellulose, polyethylene glycol, polyvinyl pyrrolidone, povidone, pregelatinized starch, propyl paraben, retinyl palmitate, shellac, silicon dioxide, sodium carboxymethyl cellulose, sodium citrate, sodium starch glycolate, sorbitol, starch (corn), stearic acid, sucrose, talc, titanium dioxide, vitamin A, vitamin E, vitamin C, and xylitol.

[0850] Pharmaceutically acceptable salts: The present disclosure also includes pharmaceutically acceptable salts of the compounds described herein. As used herein, “pharmaceutically acceptable salts” refers to derivatives of the disclosed compounds wherein the parent compound is modified by converting an existing acid or base moiety to its salt form (e.g., by reacting the free base group with a suitable organic acid). Examples of pharmaceutically acceptable salts include, but are not limited to, mineral or organic acid salts of basic residues such as amines; alkali or organic salts of acidic residues such as carboxylic acids; and the like. Representative acid addition salts include acetate, acetic acid, adipate, alginate, ascorbate, aspartate, benzenesulfonate, benzene sulfonic acid, benzoate, bisulfate, borate, butyrate, camphorate, camphorsulfonate, citrate, cyclopentanepropionate, digluconate, dodecylsulfate, ethanesulfonate, fumarate, glucoheptonate, glycerophosphate, hemisulfate, heptonate, hexanoate, hydrobromide, hydrochloride, hydroiodide, 2-hydroxy-ethanesulfonate, lactobionate, lactate, laurate, lauryl sulfate, malate, maleate, malonate, methanesulfonate, 2-naphthalenesulfonate, nicotinate, nitrate, oleate, oxalate, palmitate, pamoate, pectinate, persulfate, 3-phenylpropionate, phosphate, picrate, pivalate, propionate, stearate, succinate, sulfate, tartrate, thiocyanate, toluenesulfonate, undecanoate, valerate salts, and the like. Representative alkali or alkaline earth metal salts include sodium, lithium, potassium, calcium, magnesium, and the like, as well as nontoxic ammonium, quaternary ammonium, and amine cations, including, but not limited to ammonium, tetramethylammonium, tetraethylammonium, methylamine, dimethylamine, trimethylamine, triethylamine, ethylamine, and the like. The pharmaceutically acceptable salts of the present disclosure include the conventional non-toxic salts of the parent compound formed, for example, from non-toxic inorganic or organic acids. The pharmaceutically acceptable salts of the present disclosure can be synthesized from the parent compound which contains a basic or acidic moiety by conventional chemical methods. Generally, such salts can be prepared by reacting the free acid or base forms of these compounds with a stoichiometric amount of the appropriate base or acid in water or in an organic solvent, or in a mixture of the two; generally, nonaqueous media like ether, ethyl acetate, ethanol, isopropanol, or acetonitrile are preferred. Lists of suitable salts are found in Remington's Pharmaceutical Sciences, 17^{th} ed., Mack Publishing Company, Easton, Pa., 1985, p. 1418, Pharmaceutical Salts: Properties, Selection, and Use, P. H. Stahl and C. G. Wermuth (eds.), Wiley-VCH, 2008, and Berge et al., Journal of Pharmaceutical Science, 66, 1-19 (1977), each of which is incorporated herein by reference in its entirety.

[0851] Pharmaceutically acceptable solvate: The term “pharmaceutically acceptable solvate,” as used herein, means a compound of the invention wherein molecules of a suitable solvent are incorporated in the crystal lattice. A suitable solvent is physiologically tolerable at the dosage administered. For example, solvates may be prepared by crystallization, recrystallization, or precipitation from a solution that includes organic solvents, water, or a mixture thereof. Examples of suitable solvents are ethanol, water (for example, mono-, di-, and tri-hydrates), N-methylpyrrolidinone (NMP), dimethyl sulfoxide (DMSO), N,N′-dimethylformamide (DMF), N,N′-dimethylacetamide (DMAC), 1,3-dimethyl-2-imidazolidinone (DMEU), 1,3-dimethyl-3,4,5,6-tetrahydro-2-(1H)-pyrimidinone (DMPU), acetonitrile (ACN), propylene glycol, ethyl acetate, benzyl alcohol, 2-pyrrolidone, benzyl benzoate, and the like. When water is the solvent, the solvate is referred to as a “hydrate.”

[0852] Pharmacokinetic: As used herein, “pharmacokinetic” refers to any one or more properties of a molecule or compound as it relates to the determination of the fate of substances administered to a living organism. Pharmacokinetics is divided into several areas including the extent and rate of absorption, distribution, metabolism and excretion. This is commonly referred to as ADME where: (A) Absorption is the process of a substance entering the blood circulation; (D) Distribution is the dispersion or dissemination of substances throughout the fluids and tissues of the body; (M) Metabolism (or Biotransformation) is the irreversible transformation of parent compounds into daughter metabolites; and (E) Excretion (or Elimination) refers to the elimination of the substances from the body. In rare cases, some drugs irreversibly accumulate in body tissue.

[0853] Physicochemical: As used herein, “physicochemical” means of or relating to a physical and/or chemical property.

[0854] Polypeptide per unit drug (PUD): As used herein, a PUD or product per unit drug, is defined as a subdivided portion of total daily dose, usually 1 mg, pg, kg, etc., of a product (such as a polypeptide) as measured in body fluid or tissue, usually defined in concentration such as pmol/mL, mmol/mL, etc. divided by the measure in the body fluid.

[0855] Preventing: As used herein, the term “preventing” refers to partially or completely delaying onset of an infection, disease, disorder and/or condition; partially or completely delaying onset of one or more symptoms, features, or clinical manifestations of a particular infection, disease, disorder, and/or condition; partially or completely delaying onset of one or more symptoms, features, or manifestations of a particular infection, disease, disorder, and/or condition; partially or completely delaying progression from an infection, a particular disease, disorder and/or condition; and/or decreasing the risk of developing pathology associated with the infection, the disease, disorder, and/or condition.

[0856] Prodrug: The present disclosure also includes prodrugs of the compounds described herein. As used herein, “prodrugs” refer to any substance, molecule or entity which is in a form predicate for that substance, molecule or entity to act as a therapeutic upon chemical or physical alteration. Prodrugs may by covalently bonded or sequestered in some way and which release or are converted into the active drug moiety prior to, upon or after administered to a mammalian subject. Prodrugs can be prepared by modifying functional groups present in the compounds in such a way that the modifications are cleaved, either in routine manipulation or in vivo, to the parent compounds. Prodrugs include compounds wherein hydroxyl, amino, sulfhydryl, or carboxyl groups are bonded to any group that, when administered to a mammalian subject, cleaves to form a free hydroxyl, amino, sulfhydryl, or carboxyl group respectively. Preparation and use of prodrugs is discussed in T. Higuchi and V. Stella, “Pro-drugs as Novel Delivery Systems,” Vol. 14 of the A.C.S. Symposium Series, and in Bioreversible Carriers in Drug Design, ed. Edward B. Roche, American Pharmaceutical Association and Pergamon Press, 1987, both of which are hereby incorporated by reference in their entirety.

[0857] Proliferate: As used herein, the term “proliferate” means to grow, expand or increase or cause to grow, expand or increase rapidly. “Proliferative” means having the ability to proliferate. “Anti-proliferative” means having properties counter to or inapposite to proliferative properties.

[0858] Progenitor cell: As used herein, the term “progenitor cell” refers to cells that have greater developmental potential relative to a cell which it can give rise to by differentiation.

[0859] Prophylactic: As used herein, “prophylactic” refers to a therapeutic or course of action used to prevent the spread of disease.

[0860] Prophylaxis: As used herein, a “prophylaxis” refers to a measure taken to maintain health and prevent the spread of disease. An “immune phrophylaxis” refers to a measure to produce active or passive immunity to prevent the spread of disease.

[0861] Protein cleavage site: As used herein, “protein cleavage site” refers to a site where controlled cleavage of the amino acid chain can be accomplished by chemical, enzymatic or photochemical means.

[0862] Protein cleavage signal: As used herein “protein cleavage signal” refers to at least one amino acid that flags or marks a polypeptide for cleavage.

[0863] Protein of interest: As used herein, the terms “proteins of interest” or “desired proteins” include those provided herein and fragments, mutants, variants, and alterations thereof.

[0864] Proximal: As used herein, the term “proximal” means situated nearer to the center or to a point or region of interest.

[0865] Pseudouridine: As used herein, pseudouridine refers to the C-glycoside isomer of the nucleoside uridine. A “pseudouridine analog” is any modification, variant, isoform or derivative of pseudouridine. For example, pseudouridine analogs include but are not limited to 1-carboxymethyl-pseudouridine, 1-propynyl-pseudouridine, 1-taurinomethyl-pseudouridine, 1-taurinomethyl-4-thio-pseudouridine, 1-methylpseudouridine (m¹ψ), 1-methyl-4-thio-pseudouridine (m¹s⁴ψ), 4-thio-1-methyl-pseudouridine, 3-methyl-pseudouridine (m³ψ), 2-thio-1-methyl-pseudouridine, 1-methyl-1-deaza-pseudouridine, 2-thio-1-methyl-1-deaza-pseudouridine, dihydropseudouridine, 2-thio-dihydropseudouridine, 2-methoxyuridine, 2-methoxy-4-thio-uridine, 4-methoxy-pseudouridine, 4-methoxy-2-thio-pseudouridine, N1-methyl-pseudouridine, 1-methyl-3-(3-amino-3-carboxypropyl)pseudouridine (acp³ψ), and 2′-O-methyl-pseudouridine (ψm).

[0866] Purified: As used herein, “purify,” “purified,” “purification” means to make substantially pure or clear from unwanted components, material defilement, admixture or imperfection.

[0867] Repeated transfection: As used herein, the term “repeated transfection” refers to transfection of the same cell culture with a polynucleotide a plurality of times. The cell culture can be transfected at least twice, at least 3 times, at least 4 times, at least 5 times, at least 6 times, at least 7 times, at least 8 times, at least 9 times, at least 10 times, at least 11 times, at least 12 times, at least 13 times, at least 14 times, at least 15 times, at least 16 times, at least 17 times at least 18 times, at least 19 times, at least 20 times, at least 25 times, at least 30 times, at least 35 times, at least 40 times, at least 45 times, at least 50 times or more.

[0868] Sample: As used herein, the term “sample” or “biological sample” refers to a subset of its tissues, cells or component parts (e.g. body fluids, including but not limited to blood, mucus, lymphatic fluid, synovial fluid, cerebrospinal fluid, saliva, amniotic fluid, amniotic cord blood, urine, vaginal fluid and semen). A sample further may include a homogenate, lysate or extract prepared from a whole organism or a subset of its tissues, cells or component parts, or a fraction or portion thereof, including but not limited to, for example, plasma, serum, spinal fluid, lymph fluid, the external sections of the skin, respiratory, intestinal, and genitourinary tracts, tears, saliva, milk, blood cells, tumors, organs. A sample further refers to a medium, such as a nutrient broth or gel, which may contain cellular components, such as proteins or nucleic acid molecule.

[0869] Signal Sequences: As used herein, the phrase “signal sequences” refers to a sequence which can direct the transport or localization of a protein.

[0870] Single unit dose: As used herein, a “single unit dose” is a dose of any therapeutic administered in one dose/at one time/single route/single point of contact, i.e., single administration event.

[0871] Similarity: As used herein, the term “similarity” refers to the overall relatedness between polymeric molecules, e.g. between polynucleotide molecules (e.g. DNA molecules and/or RNA molecules) and/or between polypeptide molecules.

[0872] Calculation of percent similarity of polymeric molecules to one another can be performed in the same manner as a calculation of percent identity, except that calculation of percent similarity takes into account conservative substitutions as is understood in the art.

[0873] Split dose: As used herein, a “split dose” is the division of single unit dose or total daily dose into two or more doses.

[0874] Stable: As used herein “stable” refers to a compound that is sufficiently robust to survive isolation to a useful degree of purity from a reaction mixture, and preferably capable of formulation into an efficacious therapeutic agent.

[0875] Stabilized: As used herein, the term “stabilize”, “stabilized,” “stabilized region” means to make or become stable.

[0876] Stereoisomer: As used herein, the term “stereoisomer” refers to all possible different isomeric as well as conformational forms which a compound may possess (e.g., a compound of any formula described herein), in particular all possible stereochemically and conformationally isomeric forms, all diastereomers, enantiomers and/or conformers of the basic molecular structure. Some compounds of the present invention may exist in different tautomeric forms, all of the latter being included within the scope of the present invention.

[0877] Subject: As used herein, the term “subject” or “patient” refers to any organism to which a composition in accordance with the invention may be administered, e.g., for experimental, diagnostic, prophylactic, and/or therapeutic purposes. Typical subjects include animals (e.g., mammals such as mice, rats, rabbits, non-human primates, and humans) and/or plants.

[0878] Substantially: As used herein, the term “substantially” refers to the qualitative condition of exhibiting total or near-total extent or degree of a characteristic or property of interest. One of ordinary skill in the biological arts will understand that biological and chemical phenomena rarely, if ever, go to completion and/or proceed to completeness or achieve or avoid an absolute result. The term “substantially” is therefore used herein to capture the potential lack of completeness inherent in many biological and chemical phenomena.

[0879] Substantially equal: As used herein as it relates to time differences between doses, the term means plus/minus 2%.

[0880] Substantially simultaneously: As used herein and as it relates to plurality of doses, the term means within 2 seconds.

[0881] Suffering from: An individual who is “suffering from” a disease, disorder, and/or condition has been diagnosed with or displays one or more symptoms of a disease, disorder, and/or condition.

[0882] Susceptible to: An individual who is “susceptible to” a disease, disorder, and/or condition has not been diagnosed with and/or may not exhibit symptoms of the disease, disorder, and/or condition but harbors a propensity to develop a disease or its symptoms. In some embodiments, an individual who is susceptible to a disease, disorder, and/or condition (for example, cancer) may be characterized by one or more of the following: (1) a genetic mutation associated with development of the disease, disorder, and/or condition; (2) a genetic polymorphism associated with development of the disease, disorder, and/or condition; (3) increased and/or decreased expression and/or activity of a protein and/or nucleic acid associated with the disease, disorder, and/or condition; (4) habits and/or lifestyles associated with development of the disease, disorder, and/or condition; (5) a family history of the disease, disorder, and/or condition; and (6) exposure to and/or infection with a microbe associated with development of the disease, disorder, and/or condition. In some embodiments, an individual who is susceptible to a disease, disorder, and/or condition will develop the disease, disorder, and/or condition. In some embodiments, an individual who is susceptible to a disease, disorder, and/or condition will not develop the disease, disorder, and/or condition.

[0883] Sustained release: As used herein, the term “sustained release” refers to a pharmaceutical composition or compound release profile that conforms to a release rate over a specific period of time.

[0884] Synthetic: The term “synthetic” means produced, prepared, and/or manufactured by the hand of man. Synthesis of polynucleotides or polypeptides or other molecules of the present invention may be chemical or enzymatic.

[0885] Targeted Cells: As used herein, “targeted cells” refers to any one or more cells of interest. The cells may be found in vitro, in vivo, in situ or in the tissue or organ of an organism. The organism may be an animal, preferably a mammal, more preferably a human and most preferably a patient.

[0886] Therapeutic Agent: The term “therapeutic agent” refers to any agent that, when administered to a subject, has a therapeutic, diagnostic, and/or prophylactic effect and/or elicits a desired biological and/or pharmacological effect.

[0887] Therapeutically effective amount: As used herein, the term “therapeutically effective amount” means an amount of an agent to be delivered (e.g., nucleic acid, drug, therapeutic agent, diagnostic agent, prophylactic agent, etc.) that is sufficient, when administered to a subject suffering from or susceptible to an infection, disease, disorder, and/or condition, to treat, improve symptoms of, diagnose, prevent, and/or delay the onset of the infection, disease, disorder, and/or condition.

[0888] Therapeutically effective outcome: As used herein, the term “therapeutically effective outcome” means an outcome that is sufficient in a subject suffering from or susceptible to an infection, disease, disorder, and/or condition, to treat, improve symptoms of, diagnose, prevent, and/or delay the onset of the infection, disease, disorder, and/or condition.

[0889] Total daily dose: As used herein, a “total daily dose” is an amount given or prescribed in 24 hr period. It may be administered as a single unit dose.

[0890] Totipotency: As used herein, “totipotency” refers to a cell with a developmental potential to make all of the cells found in the adult body as well as the extra-embryonic tissues, including the placenta.

[0891] Transcription factor: As used herein, the term “transcription factor” refers to a DNA-binding protein that regulates transcription of DNA into RNA, for example, by activation or repression of transcription. Some transcription factors effect regulation of transcription alone, while others act in concert with other proteins. Some transcription factor can both activate and repress transcription under certain conditions. In general, transcription factors bind a specific target sequence or sequences highly similar to a specific consensus sequence in a regulatory region of a target gene. Transcription factors may regulate transcription of a target gene alone or in a complex with other molecules.

[0892] Transcription: As used herein, the term “transcription” refers to methods to introduce exogenous nucleic acids into a cell. Methods of transfection include, but are not limited to, chemical methods, physical treatments and cationic lipids or mixtures.

[0893] Transdifferentiation: As used herein, “transdifferentiation” refers to the capacity of differentiated cells of one type to lose identifying characteristics and to change their phenotype to that of other fully differentiated cells.

[0894] Treating: As used herein, the term “treating” refers to partially or completely alleviating, ameliorating, improving, relieving, delaying onset of, inhibiting progression of, reducing severity of, and/or reducing incidence of one or more symptoms or features of a particular infection, disease, disorder, and/or condition. For example, “treating” cancer may refer to inhibiting survival, growth, and/or spread of a tumor. Treatment may be administered to a subject who does not exhibit signs of a disease, disorder, and/or condition and/or to a subject who exhibits only early signs of a disease, disorder, and/or condition for the purpose of decreasing the risk of developing pathology associated with the disease, disorder, and/or condition.

[0895] Unmodified: As used herein, “unmodified” refers to any substance, compound or molecule prior to being changed in any way. Unmodified may, but does not always, refer to the wild type or native form of a biomolecule. Molecules may undergo a series of modifications whereby each modified molecule may serve as the “unmodified” starting molecule for a subsequent modification.

[0896] Unipotent: As used herein, “unipotent” when referring to a cell means to give rise to a single cell lineage.

[0897] Vaccine: As used herein, the phrase “vaccine” refers to a biological preparation that improves immunity to a particular disease.

[0898] Viral protein: As used herein, the phrase “viral protein” means any protein originating from a virus.

### Equivalents and Scope

[0899] Those skilled in the art will recognize, or be able to ascertain using no more than routine experimentation, many equivalents to the specific embodiments in accordance with the invention described herein. The scope of the present invention is not intended to be limited to the above Description, but rather is as set forth in the appended claims.

[0900] In the claims, articles such as “a,” “an,” and “the” may mean one or more than one unless indicated to the contrary or otherwise evident from the context. Claims or descriptions that include “or” between one or more members of a group are considered satisfied if one, more than one, or all of the group members are present in, employed in, or otherwise relevant to a given product or process unless indicated to the contrary or otherwise evident from the context. The invention includes embodiments in which exactly one member of the group is present in, employed in, or otherwise relevant to a given product or process. The invention includes embodiments in which more than one, or all of the group members are present in, employed in, or otherwise relevant to a given product or process.

[0901] It is also noted that the term “comprising” is intended to be open and permits but does not require the inclusion of additional elements or steps. When the term “comprising” is used herein, the term “consisting of” is thus also encompassed and disclosed.

[0902] Where ranges are given, endpoints are included. Furthermore, it is to be understood that unless otherwise indicated or otherwise evident from the context and understanding of one of ordinary skill in the art, values that are expressed as ranges can assume any specific value or subrange within the stated ranges in different embodiments of the invention, to the tenth of the unit of the lower limit of the range, unless the context clearly dictates otherwise.

[0903] In addition, it is to be understood that any particular embodiment of the present invention that falls within the prior art may be explicitly excluded from any one or more of the claims. Since such embodiments are deemed to be known to one of ordinary skill in the art, they may be excluded even if the exclusion is not set forth explicitly herein. Any particular embodiment of the compositions of the invention (e.g., any nucleic acid or protein encoded thereby; any method of production; any method of use; etc.) can be excluded from any one or more claims, for any reason, whether or not related to the existence of prior art.

[0904] All cited sources, for example, references, publications, databases, database entries, and art cited herein, are incorporated into this application by reference, even if not expressly stated in the citation. In case of conflicting statements of a cited source and the instant application, the statement in the instant application shall control.

[0905] Section and table headings are not intended to be limiting.

### Examples

### Example 1. Manufacture of Polynucleotides

[0906] According to the present invention, the manufacture of polynucleotides and or parts or regions thereof may be accomplished utilizing the methods taught in International Patent Publication No. WO2014152027 (Attorney Docket number M500), the contents of which is incorporated herein by reference in its entirety.

[0907] Purification methods may include those taught in International Patent Publication No. WO2014152030 (Attorney Docket number M501); International Patent Publication No. WO2014152031 (Attorney Docket number M502); each of which is incorporated herein by reference in its entirety.

[0908] Detection and characterization methods of the polynucleotides may be performed as taught in International Patent Publication No. WO2014144039 (Attorney Docket number M505), each of which is incorporated herein by reference in its entirety.

[0909] Characterization of the polynucleotides of the invention may be accomplished using a procedure selected from the group consisting of polynucleotide mapping, reverse transcriptase sequencing, charge distribution analysis, and detection of RNA impurities, wherein characterizing comprises determining the RNA transcript sequence, determining the purity of the RNA transcript, or determining the charge heterogeneity of the RNA transcript. Such methods are taught in, for example, International Patent Publication No. WO2014144711 (Attorney Docket number M506) and International Patent Publication No. WO2014144767 (Attorney Docket number M507) the contents of each of which is incorporated herein by reference in its entirety.

### Example 2. Chimeric Polynucleotide Synthesis: Triphosphate Route

### Introduction

[0910] According to the present invention, two regions or parts of a chimeric polynucleotide may be joined or ligated using triphosphate chemistry.

[0911] According to this method, a first region or part of 100 nucleotides or less is chemically synthesized with a 5′ monophosphate and terminal 3′desOH or blocked OH. If the region is longer than 80 nucleotides, it may be synthesized as two strands for ligation.

[0912] If the first region or part is synthesized as a non-positionally modified region or part using in vitro transcription (IVT), conversion the 5′monophosphate with subsequent capping of the 3′ terminus may follow.

[0913] Monophosphate protecting groups may be selected from any of those known in the art.

[0914] The second region or part of the chimeric polynucleotide may be synthesized using either chemical synthesis or IVT methods. IVT methods may include an RNA polymerase that can utilize a primer with a modified cap. Alternatively, a cap of up to 80 nucleotides may be chemically synthesized and coupled to the IVT region or part.

[0915] It is noted that for ligation methods, ligation with DNA T4 ligase, followed by treatment with DNAse should readily avoid concatenation.

[0916] The entire chimeric polynucleotide need not be manufactured with a phosphate-sugar backbone. If one of the regions or parts encodes a polypeptide, then it is preferable that such region or part comprise a phosphate-sugar backbone.

[0917] Ligation is then performed using any known click chemistry, orthoclick chemistry, solulink, or other bioconjugate chemistries known to those in the art.

### Synthetic Route

[0918] The chimeric polynucleotide is made using a series of starting segments. Such segments include:

[0919] (a) Capped and protected 5′ segment comprising a normal 3′OH (SEG. 1)

[0920] (b) 5′ triphosphate segment which may include the coding region of a polypeptide and comprising a normal 3′OH (SEG. 2)

[0921] (c) 5′ monophosphate segment for the 3′ end of the chimeric polynucleotide (e.g., the tail) comprising cordycepin or no 3′OH (SEG. 3)

[0922] After synthesis (chemical or IVT), segment 3 (SEG. 3) is treated with cordycepin and then with pyrophosphatase to create the 5′monophosphate.

[0923] Segment 2 (SEG. 2) is then ligated to SEG. 3 using RNA ligase. The ligated polynucleotide is then purified and treated with pyrophosphatase to cleave the diphosphate. The treated SEG.2-SEG. 3 construct is then purified and SEG. 1 is ligated to the 5′ terminus. A further purification step of the chimeric polynucleotide may be performed.

[0924] Where the chimeric polynucleotide encodes a polypeptide, the ligated or joined segments may be represented as: 5′UTR (SEG. 1), open reading frame or ORF (SEG. 2) and 3′UTR+PolyA (SEG. 3).

[0925] The yields of each step may be as much as 90-95%.

### Example 3: PCR for cDNA Production

[0926] PCR procedures for the preparation of cDNA are performed using 2×KAPA HIFI™ HotStart ReadyMix by Kapa Biosystems (Woburn, Mass.). This system includes 2×KAPA ReadyMix12.5 μl; Forward Primer (10 uM) 0.75 μl; Reverse Primer (10 uM) 0.75 μl; Template cDNA-100 ng; and dH₂O diluted to 25.0 μl. The reaction conditions are at 95° C. for 5 min. and 25 cycles of 98° C. for 20 sec, then 58° C. for 15 sec, then 72° C. for 45 sec, then 72° C. for 5 min. then 4° C. to termination.

[0927] The reverse primer of the instant invention incorporates a poly-T₁₂₀ for a poly-A₁₂₀ in the mRNA. Other reverse primers with longer or shorter poly(T) tracts can be used to adjust the length of the poly(A) tail in the polynucleotide mRNA.

[0928] The reaction is cleaned up using Invitrogen's PURELINK™ PCR Micro Kit (Carlsbad, Calif.) per manufacturer's instructions (up to 5 μg). Larger reactions will require a cleanup using a product with a larger capacity. Following the cleanup, the cDNA is quantified using the NANODROP™ and analyzed by agarose gel electrophoresis to confirm the cDNA is the expected size. The cDNA is then submitted for sequencing analysis before proceeding to the in vitro transcription reaction.

### Example 4. In Vitro Transcription (IVT)

[0929] The in vitro transcription reaction generates polynucleotides containing uniformly modified polynucleotides. Such uniformly modified polynucleotides may comprise a region or part of the polynucleotides of the invention. The input nucleotide triphosphate (NTP) mix is made in-house using natural and un-natural NTPs.

[0930] A typical in vitro transcription reaction includes the following:

| | | | |
|---|---|---|---|
| 1 | Template cDNA | 1.0 | μg |
| 2 | 10x transcription buffer (400 mM Tris-HCl pH 8.0, | 2.0 | μl |
| | 190 mM MgCl₂, 50 mM DTT, 10 mM Spermidine) | | |
| 3 | Custom NTPs (25 mM each) | 7.2 | μl |
| 4 | RNase Inhibitor | 20 | U |
| 5 | T7 RNA polymerase | 3000 | U |

| | | |
|---|---|---|
| 6 | dH₂0 | Up to 20.0 μl. |
| | | and |
| 7 | Incubation at 37° C. for 3 hr-5 hrs. | |

[0931] The crude IVT mix may be stored at 4° C. overnight for cleanup the next day. 1 U of RNase-free DNase is then used to digest the original template. After 15 minutes of incubation at 37° C., the mRNA is purified using Ambion's MEGACLEAR™ Kit (Austin, Tex.) following the manufacturer's instructions. This kit can purify up to 500 μg of RNA. Following the cleanup, the RNA is quantified using the NanoDrop and analyzed by agarose gel electrophoresis to confirm the RNA is the proper size and that no degradation of the RNA has occurred.

### 5. Enzymatic Capping

[0932] Capping of a polynucleotide is performed as follows where the mixture includes: IVT RNA 60 μg-180 μg and dH₂O up to 72 μl. The mixture is incubated at 65° C. for 5 minutes to denature RNA, and then is transferred immediately to ice.

[0933] The protocol then involves the mixing of 10× Capping Buffer (0.5 M Tris-HCl (pH 8.0), 60 mM KCl, 12.5 mM MgCl₂) (10.0 μl); 20 mM GTP (5.0 μl); 20 mM S-Adenosyl Methionine (2.5 μl); RNase Inhibitor (100 U); 2′-O-Methyltransferase (400 U); Vaccinia capping enzyme (Guanylyl transferase) (40 U); dH₂O (Up to 28 μl); and incubation at 37° C. for 30 minutes for 60 μg RNA or up to 2 hours for 180 μg of RNA.

[0934] The polynucleotide is then purified using Ambion's MEGACLEAR™ Kit (Austin, Tex.) following the manufacturer's instructions. Following the cleanup, the RNA is quantified using the NANODROP™ (ThermoFisher, Waltham, Mass.) and analyzed by agarose gel electrophoresis to confirm the RNA is the proper size and that no degradation of the RNA has occurred. The RNA product may also be sequenced by running a reverse-transcription-PCR to generate the cDNA for sequencing.

### Example 6. PolyA Tailing Reaction

[0935] Without a poly-T in the cDNA, a poly-A tailing reaction must be performed before cleaning the final product. This is done by mixing Capped IVT RNA (100 μl); RNase Inhibitor (20 U); 10× Tailing Buffer (0.5 M Tris-HCl (pH 8.0), 2.5 M NaCl, 100 mM MgCl₂)(12.0 μl); 20 mM ATP (6.0 μl); Poly-A Polymerase (20 U); dH₂O up to 123.5 μl and incubation at 37° C. for 30 min. If the poly-A tail is already in the transcript, then the tailing reaction may be skipped and proceed directly to cleanup with Ambion's MEGACLEAR™ kit (Austin, Tex.) (up to 500 μg). Poly-A Polymerase is preferably a recombinant enzyme expressed in yeast.

[0936] It should be understood that the processivity or integrity of the polyA tailing reaction may not always result in an exact size polyA tail. Hence polyA tails of approximately between 40-200 nucleotides, e.g., about 40, 50, 60, 70, 80, 90, 91, 92, 93, 94, 95, 96, 97, 98, 99, 100, 101, 102, 103, 104, 105, 106, 107, 108, 109, 110, 150-165, 155, 156, 157, 158, 159, 160, 161, 162, 163, 164 or 165 are within the scope of the invention.

### Example 7. Natural 5′ Caps and 5′ Cap Analogues

[0937] 5′-capping of polynucleotides may be completed concomitantly during the in vitro-transcription reaction using the following chemical RNA cap analogs to generate the 5′-guanosine cap structure according to manufacturer protocols: 3′-O-Me-m7G(5′)ppp(5′) G [the ARCA cap];G(5)ppp(5′)A; G(5′)ppp(5′)G; m7G(5′)ppp(5′)A; m7G(5′)ppp(5′)G (New England BioLabs, Ipswich, Mass.). 5′-capping of modified RNA may be completed post-transcriptionally using a Vaccinia Virus Capping Enzyme to generate the “Cap 0” structure: m7G(5′)ppp(5′)G (New England BioLabs, Ipswich, Mass.). Cap 1 structure may be generated using both Vaccinia Virus Capping Enzyme and a 2′-O methyl-transferase to generate: m7G(5′)ppp(5′)G-2′-O-methyl. Cap 2 structure may be generated from the Cap 1 structure followed by the 2′-O-methylation of the 5′-antepenultimate nucleotide using a 2′-O methyl-transferase. Cap 3 structure may be generated from the Cap 2 structure followed by the 2′-O-methylation of the 5′-preantepenultimate nucleotide using a 2′-O methyl-transferase. Enzymes are preferably derived from a recombinant source.

[0938] When transfected into mammalian cells, the modified mRNAs have a stability of between 12-18 hours or more than 18 hours, e.g., 24, 36, 48, 60, 72 or greater than 72 hours.

### Example 8. Capping Assays

[0939] A. Protein Expression Assay

[0940] Polynucleotides encoding a polypeptide, containing any of the caps taught herein can be transfected into cells at equal concentrations. 6, 12, 24 and 36 hours post-transfection the amount of protein secreted into the culture medium can be assayed by ELISA. Synthetic polynucleotides that secrete higher levels of protein into the medium would correspond to a synthetic polynucleotide with a higher translationally-competent Cap structure.

[0941] B. Purity Analysis Synthesis

[0942] Polynucleotides encoding a polypeptide, containing any of the caps taught herein can be compared for purity using denaturing Agarose-Urea gel electrophoresis or HPLC analysis. Polynucleotides with a single, consolidated band by electrophoresis correspond to the higher purity product compared to polynucleotides with multiple bands or streaking bands. Synthetic polynucleotides with a single HPLC peak would also correspond to a higher purity product. The capping reaction with a higher efficiency would provide a more pure polynucleotide population.

[0943] C. Cytokine Analysis

[0944] Polynucleotides encoding a polypeptide, containing any of the caps taught herein can be transfected into cells at multiple concentrations. 6, 12, 24 and 36 hours post-transfection the amount of pro-inflammatory cytokines such as TNF-alpha and IFN-beta secreted into the culture medium can be assayed by ELISA. Polynucleotides resulting in the secretion of higher levels of pro-inflammatory cytokines into the medium would correspond to a polynucleotides containing an immune-activating cap structure.

[0945] D. Capping Reaction Efficiency

[0946] Polynucleotides encoding a polypeptide, containing any of the caps taught herein can be analyzed for capping reaction efficiency by LC-MS after nuclease treatment. Nuclease treatment of capped polynucleotides would yield a mixture of free nucleotides and the capped 5′-5-triphosphate cap structure detectable by LC-MS. The amount of capped product on the LC-MS spectra can be expressed as a percent of total polynucleotide from the reaction and would correspond to capping reaction efficiency. The cap structure with higher capping reaction efficiency would have a higher amount of capped product by LC-MS.

### Example 9. Agarose Gel Electrophoresis of Modified RNA or RT PCR Products

[0947] Individual polynucleotides (200-400 ng in a 20 μl volume) or reverse transcribed PCR products (200-400 ng) are loaded into a well on a non-denaturing 1.2% Agarose E-Gel (Invitrogen, Carlsbad, Calif.) and run for 12-15 minutes according to the manufacturer protocol.

### Example 10. Nanodrop Modified RNA Quantification and UV Spectral Data

[0948] Modified polynucleotides in TE buffer (1 μl) are used for Nanodrop UV absorbance readings to quantitate the yield of each polynucleotide from a chemical synthesis or in vitro transcription reaction.

### Example 11. Formulation of Modified mRNA Using Lipidoids

[0949] Polynucleotides are formulated for in vitro experiments by mixing the polynucleotides with the lipidoid at a set ratio prior to addition to cells. In vivo formulation may require the addition of extra ingredients to facilitate circulation throughout the body. To test the ability of these lipidoids to form particles suitable for in vivo work, a standard formulation process used for siRNA-lipidoid formulations may be used as a starting point. After formation of the particle, polynucleotide is added and allowed to integrate with the complex. The encapsulation efficiency is determined using a standard dye exclusion assays.

### Example 12. Method of Screening for Protein Expression

[0950] A. Electrospray Ionization

[0951] A biological sample which may contain proteins encoded by a polynucleotide administered to the subject is prepared and analyzed according to the manufacturer protocol for electrospray ionization (ESI) using 1, 2, 3 or 4 mass analyzers. A biologic sample may also be analyzed using a tandem ESI mass spectrometry system.

[0952] Patterns of protein fragments, or whole proteins, are compared to known controls for a given protein and identity is determined by comparison.

[0953] B. Matrix-Assisted Laser Desorption/Ionization

[0954] A biological sample which may contain proteins encoded by one or more polynucleotides administered to the subject is prepared and analyzed according to the manufacturer protocol for matrix-assisted laser desorption/ionization (MALDI).

[0955] Patterns of protein fragments, or whole proteins, are compared to known controls for a given protein and identity is determined by comparison.

[0956] C. Liquid Chromatography-Mass Spectrometry-Mass Spectrometry

[0957] A biological sample, which may contain proteins encoded by one or more polynucleotides, may be treated with a trypsin enzyme to digest the proteins contained within. The resulting peptides are analyzed by liquid chromatography-mass spectrometry-mass spectrometry (LC/MS/MS). The peptides are fragmented in the mass spectrometer to yield diagnostic patterns that can be matched to protein sequence databases via computer algorithms. The digested sample may be diluted to achieve 1 ng or less starting material for a given protein. Biological samples containing a simple buffer background (e.g. water or volatile salts) are amenable to direct in-solution digest; more complex backgrounds (e.g. detergent, non-volatile salts, glycerol) require an additional clean-up step to facilitate the sample analysis.

[0958] Patterns of protein fragments, or whole proteins, are compared to known controls for a given protein and identity is determined by comparison.

### Example 13. Cyclization and/or Concatemerization

[0959] According to the present invention, a polynucleotide may be cyclized, or concatemerized, to generate a translation competent molecule to assist interactions between poly-A binding proteins and 5′-end binding proteins. The mechanism of cyclization or concatemerization may occur through at least 3 different routes: 1) chemical, 2) enzymatic, and 3) ribozyme catalyzed. The newly formed 5′-/3′-linkage may be intramolecular or intermolecular.

[0960] In the first route, the 5′-end and the 3′-end of the nucleic acid contain chemically reactive groups that, when close together, form a new covalent linkage between the 5′-end and the 3′-end of the molecule. The 5′-end may contain an NHS-ester reactive group and the 3′-end may contain a 3′-amino-terminated nucleotide such that in an organic solvent the 3′-amino-terminated nucleotide on the 3′-end of a synthetic mRNA molecule will undergo a nucleophilic attack on the 5′-NHS-ester moiety forming a new 5′-/3′-amide bond.

[0961] In the second route, T4 RNA ligase may be used to enzymatically link a 5′-phosphorylated nucleic acid molecule to the 3′-hydroxyl group of a nucleic acid forming a new phosphorodiester linkage. In an example reaction, 1 μg of a nucleic acid molecule is incubated at 37° C. for 1 hour with 1-10 units of T4 RNA ligase (New England Biolabs, Ipswich, Mass.) according to the manufacturer's protocol. The ligation reaction may occur in the presence of a split polynucleotide capable of base-pairing with both the 5′- and 3′-region in juxtaposition to assist the enzymatic ligation reaction.

[0962] In the third route, either the 5′- or 3′-end of the cDNA template encodes a ligase ribozyme sequence such that during in vitro transcription, the resultant nucleic acid molecule can contain an active ribozyme sequence capable of ligating the 5′-end of a nucleic acid molecule to the 3′-end of a nucleic acid molecule. The ligase ribozyme may be derived from the Group I Intron, Group I Intron, Hepatitis Delta Virus, Hairpin ribozyme or may be selected by SELEX (systematic evolution of ligands by exponential enrichment). The ribozyme ligase reaction may take 1 to 24 hours at temperatures between 0 and 37° C. It is to be understood that the words which have been used are words of description rather than limitation, and that changes may be made within the purview of the appended claims without departing from the true scope and spirit of the invention in its broader aspects.

[0963] While the present invention has been described at some length and with some particularity with respect to the several described embodiments, it is not intended that it should be limited to any such particulars or embodiments or any particular embodiment, but it is to be construed with references to the appended claims so as to provide the broadest possible interpretation of such claims in view of the prior art and, therefore, to effectively encompass the intended scope of the invention.

[0964] All publications, patent applications, patents, and other references mentioned herein are incorporated by reference in their entirety. In case of conflict, the present specification, including definitions, will control. In addition, section headings, the materials, methods, and examples are illustrative only and not intended to be limiting.

The application's sequence listing, which the Patent Office published only in electronic form, follows.

SEQUENCE LISTING (599 sequences)

SEQ ID NO: 1 - protein, 22 aa, Unknown
  Description of Unknown: 2A peptide sequence
GSGATNFSLLKQAGDVEENPGP

SEQ ID NO: 2 - DNA, 66 bp, Unknown
  Description of Unknown: Nucleic acid sequence of the 2A peptide
ggaagcggagctactaacttcagcctgctgaagcaggctggagacgtggaggagaaccctggacct

SEQ ID NO: 3 - DNA, 47 bp, Artificial Sequence
  Description of Artificial Sequence: Untranslated Region
gggaaataagagagaaaagaagagtaagaagaaatataagagccacc

SEQ ID NO: 4 - DNA, 47 bp, Artificial Sequence
  Description of Artificial Sequence: Untranslated Region
gggagatcagagagaaaagaagagtaagaagaaatataagagccacc

SEQ ID NO: 5 - DNA, 145 bp, Artificial Sequence
  Description of Artificial Sequence: Untranslated Region
ggaataaaagtctcaacacaacatatacaaaacaaacgaatctcaagcaatcaagcattctacttctattgcagcaatttaaatcatttcttttaaagcaaaagcaattttctgaaaattttcaccatttacgaacgatagcaac

SEQ ID NO: 6 - RNA, 42 nt, Artificial Sequence
  Description of Artificial Sequence: Untranslated Region
gggagacaagcuuggcauuccgguacuguugguaaagccacc

SEQ ID NO: 7 - DNA, 47 bp, Artificial Sequence; identical to SEQ ID NO: 4
  Description of Artificial Sequence: Untranslated Region

SEQ ID NO: 8 - DNA, 145 bp, Artificial Sequence; identical to SEQ ID NO: 5
  Description of Artificial Sequence: Untranslated Region

SEQ ID NO: 9 - RNA, 42 nt, Artificial Sequence; identical to SEQ ID NO: 6
  Description of Artificial Sequence: Untranslated Region

SEQ ID NO: 10 - DNA, 47 bp, Artificial Sequence
  Description of Artificial Sequence: Untranslated Region
gggaattaacagagaaaagaagagtaagaagaaatataagagccacc

SEQ ID NO: 11 - DNA, 47 bp, Artificial Sequence
  Description of Artificial Sequence: Untranslated Region
gggaaattagacagaaaagaagagtaagaagaaatataagagccacc

SEQ ID NO: 12 - DNA, 47 bp, Artificial Sequence
  Description of Artificial Sequence: Untranslated Region
gggaaataagagagtaaagaacagtaagaagaaatataagagccacc

SEQ ID NO: 13 - DNA, 47 bp, Artificial Sequence
  Description of Artificial Sequence: Untranslated Region
gggaaaaaagagagaaaagaagactaagaagaaatataagagccacc

SEQ ID NO: 14 - DNA, 47 bp, Artificial Sequence
  Description of Artificial Sequence: Untranslated Region
gggaaataagagagaaaagaagagtaagaagatatataagagccacc

SEQ ID NO: 15 - DNA, 47 bp, Artificial Sequence
  Description of Artificial Sequence: Untranslated Region
gggaaataagagacaaaacaagagtaagaagaaatataagagccacc

SEQ ID NO: 16 - DNA, 47 bp, Artificial Sequence
  Description of Artificial Sequence: Untranslated Region
gggaaattagagagtaaagaacagtaagtagaattaaaagagccacc

SEQ ID NO: 17 - DNA, 47 bp, Artificial Sequence
  Description of Artificial Sequence: Untranslated Region
gggaaataagagagaatagaagagtaagaagaaatataagagccacc

SEQ ID NO: 18 - DNA, 47 bp, Artificial Sequence
  Description of Artificial Sequence: Untranslated Region
gggaaataagagagaaaagaagagtaagaagaaaattaagagccacc

SEQ ID NO: 19 - DNA, 47 bp, Artificial Sequence
  Description of Artificial Sequence: Untranslated Region
gggaaataagagagaaaagaagagtaagaagaaatttaagagccacc

SEQ ID NO: 20 - DNA, 371 bp, Unknown
  Description of Unknown: Untranslated Region Sequence
gcgcctgcccacctgccaccgactgctggaacccagccagtgggagggcctggcccaccagagtcctgctccctcactcctcgccccgccccctgtcccagagtcccacctgggggctctctccacccttctcagagttccagtttcaaccagagttccaaccaatgggctccatcctctggattctggccaatgaaatatctccctggcagggtcctcttcttttcccagagctccaccccaaccaggagctctagttaatggagagctcccagcacactcggagcttgtgctttgtctccacgcaaagcgataaataaaagcattggtggcctttggtctttgaataaagcctgagtaggaagtctaga

SEQ ID NO: 21 - DNA, 568 bp, Unknown
  Description of Unknown: Untranslated Region Sequence
gcccctgccgctcccacccccacccatctgggccccgggttcaagagagagcggggtctgatctcgtgtagccatatagagtttgcttctgagtgtctgctttgtttagtagaggtgggcaggaggagctgaggggctggggctggggtgttgaagttggctttgcatgcccagcgatgcgcctccctgtgggatgtcatcaccctgggaaccgggagtggcccttggctcactgtgttctgcatggtttggatctgaattaattgtcctttcttctaaatcccaaccgaacttcttccaacctccaaactggctgtaaccccaaatccaagccattaactacacctgacagtagcaattgtctgattaatcactggccccttgaagacagcagaatgtccctttgcaatgaggaggagatctgggctgggcgggccagctggggaagcatttgactatctggaacttgtgtgtgcctcctcaggtatggcagtgactcacctggttttaataaaacaacctgcaacatctcatggtctttgaataaagcctgagtaggaagtctaga

SEQ ID NO: 22 - DNA, 289 bp, Unknown
  Description of Unknown: Untranslated Region Sequence
acacactccacctccagcacgcgacttctcaggacgacgaatcttctcaatgggggggcggctgagctccagccaccccgcagtcactttctttgtaacaacttccgttgctgccatcgtaaactgacacagtgtttataacgtgtacatacattaacttattacctcattttgttatttttcgaaacaaagccctgtggaagaaaatggaaaacttgaagaagcattaaagtcattctgttaagctgcgtaaatggtctttgaataaagcctgagtaggaagtctaga

SEQ ID NO: 23 - DNA, 379 bp, Unknown
  Description of Unknown: Untranslated Region Sequence
catcacatttaaaagcatctcagcctaccatgagaataagagaaagaaaatgaagatcaaaagcttattcatctgtttttctttttcgttggtgtaaagccaacaccctgtctaaaaaacataaatttctttaatcattttgcctcttttctctgtgcttcaattaataaaaaatggaaagaatctaatagagtggtacagcactgttatttttcaaagatgtgttgctatcctgaaaattctgtaggttctgtggaagttccagtgttctctcttattccacttcggtagaggatttctagtttcttgtgggctaattaaataaatcattaatactcttctaatggtctttgaataaagcctgagtaggaagtctaga

SEQ ID NO: 24 - DNA, 118 bp, Unknown
  Description of Unknown: Untranslated Region Sequence
gctgccttctgcggggcttgccttctggccatgcccttcttctctcccttgcacctgtacctcttggtctttgaataaagcctgagtaggaaggcggccgctcgagcatgcatctaga

SEQ ID NO: 25 - DNA, 908 bp, Unknown
  Description of Unknown: Untranslated Region Sequence
gccaagccctccccatcccatgtatttatctctatttaatatttatgtctatttaagcctcatatttaaagacagggaagagcagaacggagccccaggcctctgtgtccttccctgcatttctgagtttcattctcctgcctgtagcagtgagaaaaagctcctgtcctcccatcccctggactgggaggtagataggtaaataccaagtatttattactatgactgctccccagccctggctctgcaatgggcactgggatgagccgctgtgagcccctggtcctgagggtccccacctgggacccttgagagtatcaggtctcccacgtgggagacaagaaatccctgtttaatatttaaacagcagtgttccccatctgggtccttgcacccctcactctggcctcagccgactgcacagcggcccctgcatccccttggctgtgaggcccctggacaagcagaggtggccagagctgggaggcatggccctggggtcccacgaatttgctggggaatctcgtttttcttcttaagacttttgggacatggtttgactcccgaacatcaccgacgcgtctcctgtttttctgggtggcctcgggacacctgccctgcccccacgagggtcaggactgtgactctttttagggccaggcaggtgcctggacatttgccttgctggacggggactggggatgtgggagggagcagacaggaggaatcatgtcaggcctgtgtgtgaaaggaagctccactgtcaccctccacctcttcaccccccactcaccagtgtcccctccactgtcacattgtaactgaacttcaggataataaagtgtttgcctccatggtctttgaataaagcctgagtaggaaggcggccgctcgagcatgcatctaga

SEQ ID NO: 26 - DNA, 835 bp, Unknown
  Description of Unknown: Untranslated Region Sequence
actcaatctaaattaaaaaagaaagaaatttgaaaaaactttctctttgccatttcttcttcttcttttttaactgaaagctgaatccttccatttcttctgcacatctacttgcttaaattgtgggcaaaagagaaaaagaaggattgatcagagcattgtgcaatacagtttcattaactccttcccccgctcccccaaaaatttgaatttttttttcaacactcttacacctgttatggaaaatgtcaacctttgtaagaaaaccaaaataaaaattgaaaaataaaaaccataaacatttgcaccacttgtggcttttgaatatcttccacagagggaagtttaaaacccaaacttccaaaggtttaaactacctcaaaacactttcccatgagtgtgatccacattgttaggtgctgacctagacagagatgaactgaggtccttgttttgttttgttcataatacaaaggtgctaattaatagtatttcagatacttgaagaatgttgatggtgctagaagaatttgagaagaaatactcctgtattgagttgtatcgtgtggtgtattttttaaaaaatttgatttagcattcatattttccatcttattcccaattaaaagtatgcagattatttgcccaaatcttcttcagattcagcatttgttctttgccagtctcattttcatcttcttccatggttccacagaagctttgtttcttgggcaagcagaaaaattaaattgtacctattttgtatatgtgagatgtttaaataaattgtgaaaaaaatgaaataaagcatgtttggttttccaaaagaacatat

SEQ ID NO: 27 - DNA, 297 bp, Unknown
  Description of Unknown: Untranslated Region Sequence
cgccgccgcccgggccccgcagtcgagggtcgtgagcccaccccgtccatggtgctaagcgggcccgggtcccacacggccagcaccgctgctcactcggacgacgccctgggcctgcacctctccagctcctcccacggggtccccgtagccccggcccccgcccagccccaggtctccccaggccctccgcaggctgcccggcctccctccccctgcagccatcccaaggctcctgacctacctggcccctgagctctggagcaagccctgacccaataaaggctttgaacccat

SEQ ID NO: 28 - DNA, 602 bp, Unknown
  Description of Unknown: Untranslated Region Sequence
ggggctagagccctctccgcacagcgtggagacggggcaaggaggggggttattaggattggtggttttgttttgctttgtttaaagccgtgggaaaatggcacaactttacctctgtgggagatgcaacactgagagccaaggggtgggagttgggataatttttatataaaagaagtttttccactttgaattgctaaaagtggcatttttcctatgtgcagtcactcctctcatttctaaaatagggacgtggccaggcacggtggctcatgcctgtaatcccagcactttgggaggccgaggcaggcggctcacgaggtcaggagatcgagactatcctggctaacacggtaaaaccctgtctctactaaaagtacaaaaaattagctgggcgtggtggtgggcacctgtagtcccagctactcgggaggctgaggcaggagaaaggcatgaatccaagaggcagagcttgcagtgagctgagatcacgccattgcactccagcctgggcaacagtgttaagactctgtctcaaatataaataaataaataaataaataaataaataaataaaaataaagcgagatgttgccctcaaa

SEQ ID NO: 29 - DNA, 785 bp, Unknown
  Description of Unknown: Untranslated Region Sequence
ggccctgccccgtcggactgcccccagaaagcctcctgccccctgccagtgaagtccttcagtgagcccctccccagccagcccttccctggccccgccggatgtataaatgtaaaaatgaaggaattacattttatatgtgagcgagcaagccggcaagcgagcacagtattatttctccatcccctccctgcctgctccttggcacccccatgctgccttcagggagacaggcagggagggcttggggctgcacctcctaccctcccaccagaacgcaccccactgggagagctggtggtgcagccttcccctccctgtataagacactttgccaaggctctcccctctcgccccatccctgcttgcccgctcccacagcttcctgagggctaattctgggaagggagagttctttgctgcccctgtctggaagacgtggctctgggtgaggtaggcgggaaaggatggagtgttttagttcttgggggaggccaccccaaaccccagccccaactccaggggcacctatgagatggccatgctcaacccccctcccagacaggccctccctgtctccagggcccccaccgaggttcccagggctggagacttcctctggtaaacattcctccagcctcccctcccctggggacgccaaggaggtgggccacacccaggaagggaaagcgggcagccccgttttggggacgtgaacgttttaataatttttgctgaattcctttacaactaaataacacagatattgttataaataaaattgt

SEQ ID NO: 30 - DNA, 3001 bp, Unknown
  Description of Unknown: Untranslated Region Sequence
atattaaggatcaagctgttagctaataatgccacctctgcagttttgggaacaggcaaataaagtatcagtatacatggtgatgtacatctgtagcaaagctcttggagaaaatgaagactgaagaaagcaaagcaaaaactgtatagagagatttttcaaaagcagtaatccctcaattttaaaaaaggattgaaaattctaaatgtctttctgtgcatattttttgtgttaggaatcaaaagtattttataaaaggagaaagaacagcctcattttagatgtagtcctgttggattttttatgcctcctcagtaaccagaaatgttttaaaaaactaagtgtttaggatttcaagacaacattatacatggctctgaaatatctgacacaatgtaaacattgcaggcacctgcattttatgttttttttttcaacaaatgtgactaatttgaaacttttatgaacttctgagctgtccccttgcaattcaaccgcagtttgaattaatcatatcaaatcagttttaattttttaaattgtacttcagagtctatatttcaagggcacattttctcactactattttaatacattaaaggactaaataatctttcagagatgctggaaacaaatcatttgctttatatgtttcattagaataccaatgaaacatacaacttgaaaattagtaatagtatttttgaagatcccatttctaattggagatctctttaatttcgatcaacttataatgtgtagtactatattaagtgcacttgagtggaattcaacatttgactaataaaatgagttcatcatgttggcaagtgatgtggcaattatctctggtgacaaaagagtaaaatcaaatatttctgcctgttacaaatatcaaggaagacctgctactatgaaatagatgacattaatctgtcttcactgtttataatacggatggattttttttcaaatcagtgtgtgttttgaggtcttatgtaattgatgacatttgagagaaatggtggctttttttagctacctctttgttcatttaagcaccagtaaagatcatgtctttttatagaagtgtagattttctttgtgactttgctatcgtgcctaaagctctaaatataggtgaatgtgtgatgaatactcagattatttgtctctctatataattagtttggtactaagtttctcaaaaaattattaacacatgaaagacaatctctaaaccagaaaaagaagtagtacaaattttgttactgtaatgctcgcgtttagtgagtttaaaacacacagtatcttttggttttataatcagtttctattttgctgtgcctgagattaagatctgtgtatgtgtgtgtgtgtgtgtgtgcgtttgtgtgttaaagcagaaaagacttttttaaaagttttaagtgataaatgcaatttgttaattgatcttagatcactagtaaactcagggctgaattataccatgtatattctattagaagaaagtaaacaccatctttattcctgccctttttcttctctcaaagtagttgtagttatatctagaaagaagcaattttgatttcttgaaaaggtagttcctgcactcagtttaaactaaaaataatcatacttggattttatttatttttgtcatagtaaaaattttaatttatatatatttttatttagtattatcttattctttgctatttgccaatcctttgtcatcaattgtgttaaatgaattgaaaattcatgccctgttcattttattttactttattggttaggatatttaaaggatttttgtatatataatttcttaaattaatattccaaaaggttagtggacttagattataaattatggcaaaaatctaaaaacaacaaaaatgatttttatacattctatttcattattcctctttttccaataagtcatacaattggtagatatgacttattttatttttgtattattcactatatctttatgatatttaagtataaataattaaaaaaatttattgtaccttatagtctgtcaccaaaaaaaaaaaattatctgtaggtagtgaaatgctaatgttgatttgtctttaagggcttgttaactatcctttattttctcatttgtcttaaattaggagtttgtgtttaaattactcatctaagcaaaaaatgtatataaatcccattactgggtatatacccaaaggattataaatcatgctgctataaagacacatgcacacgtatgtttattgcagcactattcacaatagcaaagacttggaaccaacccaaatgtccatcaatgatagacttgattaagaaaatgtgcacatatacaccatggaatactatgcagccataaaaaaggatgagttcatgtcctttgtagggacatggataaagctggaaaccatcattctgagcaaactattgcaaggacagaaaaccaaacactgcatgttctcactcataggtgggaattgaacaatgagaacacttggacacaaggtggggaacaccacacaccagggcctgtcatggggtggggggagtggggagggatagcattaggagatatacctaatgtaaatgatgagttaatgggtgcagcacaccaacatggcacatgtatacatatgtagcaaacctgcacgttgtgcacatgtaccctagaacttaaagtataattaaaaaaaaaaagaaaacagaagctatttataaagaagttatttgctgaaataaatgtgatctttcccattaaaaaaataaagaaattttggggtaaaaaaacacaatatattgtattcttgaaaaattctaagagagtggatgtgaagtgttctcaccacaaaagtgataactaattgaggtaatgcacatattaattagaaagattttgtcattccacaatgtatatatacttaaaaatatgttatacacaataaatacatacattaaaaaataagtaaatgta

SEQ ID NO: 31 - DNA, 1037 bp, Unknown
  Description of Unknown: Untranslated Region Sequence
cccaccctgcacgccggcaccaaaccctgtcctcccacccctccccactcatcactaaacagagtaaaatgtgatgcgaattttcccgaccaacctgattcgctagattttttttaaggaaaagcttggaaagccaggacacaacgctgctgcctgctttgtgcagggtcctccggggctcagccctgagttggcatcacctgcgcagggccctctggggctcagccctgagctagtgtcacctgcacagggccctctgaggctcagccctgagctggcgtcacctgtgcagggccctctggggctcagccctgagctggcctcacctgggttccccaccccgggctctcctgccctgccctcctgcccgccctccctcctgcctgcgcagctccttccctaggcacctctgtgctgcatcccaccagcctgagcaagacgccctctcggggcctgtgccgcactagcctccctctcctctgtccccatagctggtttttcccaccaatcctcacctaacagttactttacaattaaactcaaagcaagctcttctcctcagcttggggcagccattggcctctgtctcgttttgggaaaccaaggtcaggaggccgttgcagacataaatctcggcgactcggccccgtctcctgagggtcctgctggtgaccggcctggaccttggccctacagccctggaggccgctgctgaccagcactgaccccgacctcagagagtactcgcaggggcgctggctgcactcaagaccctcgagattaacggtgctaaccccgtctgctcctccctcccgcagagactggggcctggactggacatgagagccccttggtgccacagagggctgtgtcttactagaaacaacgcaaacctctccttcctcagaatagtgatgtgttcgacgttttatcaaaggccccctttctatgttcatgttagttttgctccttctgtgtttttttctgaaccatatccatgttgctgacttttccaaataaaggttttcactcctctc

SEQ ID NO: 32 - DNA, 577 bp, Unknown
  Description of Unknown: Untranslated Region Sequence
agaggcctgcctccagggctggactgaggcctgagcgctcctgccgcagagctggccgcgccaaataatgtctctgtgagactcgagaactttcatttttttccaggctggttcggatttggggtggattttggttttgttcccctcctccactctcccccaccccctccccgcccttttttttttttttttttaaactggtattttatctttgattctccttcagccctcacccctggttctcatctttcttgatcaacatcttttcttgcctctgtccccttctctcatctcttagctcccctccaacctggggggcagtggtgtggagaagccacaggcctgagatttcatctgctctccttcctggagcccagaggagggcagcagaagggggtggtgtctccaaccccccagcactgaggaagaacggggctcttctcatttcacccctccctttctcccctgcccccaggactgggccacttctgggtggggcagtgggtcccagattggctcacactgagaatgtaagaactacaaacaaaatttctattaaattaaattttgtgtctcc

SEQ ID NO: 33 - DNA, 2212 bp, Unknown
  Description of Unknown: Untranslated Region Sequence
ctccctccatcccaacctggctccctcccacccaaccaactttccccccaacccggaaacagacaagcaacccaaactgaaccccctcaaaagccaaaaaatgggagacaatttcacatggactttggaaaatatttttttcctttgcattcatctctcaaacttagtttttatctttgaccaaccgaacatgaccaaaaaccaaaagtgcattcaaccttaccaaaaaaaaaaaaaaaaaaagaataaataaataactttttaaaaaaggaagcttggtccacttgcttgaagacccatgcgggggtaagtccctttctgcccgttgggcttatgaaaccccaatgctgccctttctgctcctttctccacaccccccttggggcctcccctccactccttcccaaatctgtctccccagaagacacaggaaacaatgtattgtctgcccagcaatcaaaggcaatgctcaaacacccaagtggcccccaccctcagcccgctcctgcccgcccagcacccccaggccctgggggacctggggttctcagactgccaaagaagccttgccatctggcgctcccatggctcttgcaacatctccccttcgtttttgagggggtcatgccgggggagccaccagcccctcactgggttcggaggagagtcaggaagggccacgacaaagcagaaacatcggatttggggaacgcgtgtcaatcccttgtgccgcagggctgggcgggagagactgttctgttccttgtgtaactgtgttgctgaaagactacctcgttcttgtcttgatgtgtcaccggggcaactgcctgggggcggggatgggggcagggtggaagcggctccccattttataccaaaggtgctacatctatgtgatgggtggggtggggagggaatcactggtgctatagaaattgagatgcccccccaggccagcaaatgttcctttttgttcaaagtctatttttattccttgatatttttctttttttttttttttttttgtggatggggacttgtgaatttttctaaaggtgctatttaacatgggaggagagcgtgtgcggctccagcccagcccgctgctcactttccaccctctctccacctgcctctggcttctcaggcctctgctctccgacctctctcctctgaaaccctcctccacagctgcagcccatcctcccggctccctcctagtctgtcctgcgtcctctgtccccgggtttcagagacaacttcccaaagcacaaagcagtttttccccctaggggtgggaggaagcaaaagactctgtacctattttgtatgtgtataataatttgagatgtttttaattattttgattgctggaataaagcatgtggaaatgacccaaacataatccgcagtggcctcctaatttccttctttggagttgggggaggggtagacatggggaaggggctttggggtgatgggcttgccttccattcctgccctttccctccccactattctcttctagatccctccataaccccactcccctttctctcacccttcttataccgcaaacctttctacttcctctttcattttctattcttgcaatttccttgcaccttttccaaatcctcttctcccctgcaataccatacaggcaatccacgtgcacaacacacacacacactcttcacatctggggttgtccaaacctcatacccactccccttcaagcccatccactctccaccccctggatgccctgcacttggtggcggtgggatgctcatggatactgggagggtgaggggagtggaacccgtgaggaggacctgggggcctctccttgaactgacatgaagggtcatctggcctctgctcccttctcacccacgctgacctcctgccgaaggagcaacgcaacaggagaggggtctgctgagcctggcgagggtctgggagggaccaggaggaaggcgtgctccctgctcgctgtcctggccctgggggagtgagggagacagacacctgggagagctgtggggaaggcactcgcaccgtgctcttgggaaggaaggagacctggccctgctcaccacggactgggtgcctcgacctcctgaatccccagaacacaacccccctgggctggggtggtctggggaaccatcgtgcccccgcctcccgcctactcctttttaagctt

SEQ ID NO: 34 - DNA, 729 bp, Unknown
  Description of Unknown: Untranslated Region Sequence
ttggccaggcctgaccctcttggacctttcttctttgccgacaaccactgcccagcagcctctgggacctcggggtcccagggaacccagtccagcctcctggctgttgacttcccattgctcttggagccaccaatcaaagagattcaaagagattcctgcaggccagaggcggaacacacctttatggctggggctctccgtggtgttctggacccagcccctggagacaccattcacttttactgctttgtagtgactcgtgctctccaacctgtcttcctgaaaaaccaaggcccccttcccccacctcttccatggggtgagacttgagcagaacaggggcttccccaagttgcccagaaagactgtctgggtgagaagccatggccagagcttctcccaggcacaggtgttgcaccagggacttctgcttcaagttttggggtaaagacacctggatcagactccaagggctgccctgagtctgggacttctgcctccatggctggtcatgagagcaaaccgtagtcccctggagacagcgactccagagaacctcttgggagacagaagaggcatctgtgcacagctcgatcttctacttgcctgtggggaggggagtgacaggtccacacaccacactgggtcaccctgtcctggatgcctctgaagagagggacagaccgtcagaaactggagagtttctattaaaggtcatttaaacca

SEQ ID NO: 35 - DNA, 847 bp, Unknown
  Description of Unknown: Untranslated Region Sequence
tcctccgggaccccagccctcaggattcctgatgctccaaggcgactgatgggcgctggatgaagtggcacagtcagcttccctgggggctggtgtcatgttgggctcctggggcgggggcacggcctggcatttcacgcattgctgccaccccaggtccacctgtctccactttcacagcctccaagtctgtggctcttcccttctgtcctccgaggggcttgccttctctcgtgtccagtgaggtgctcagtgatcggcttaacttagagaagcccgccccctccccttctccgtctgtcccaagagggtctgctctgagcctgcgttcctaggtggctcggcctcagctgcctgggttgtggccgccctagcatcctgtatgcccacagctactggaatccccgctgctgctccgggccaagcttctggttgattaatgagggcatggggtggtccctcaagaccttcccctaccttttgtggaaccagtgatgcctcaaagacagtgtcccctccacagctgggtgccaggggcaggggatcctcagtatagccggtgaaccctgataccaggagcctgggcctccctgaacccctggcttccagccatctcatcgccagcctcctcctggacctcttggcccccagccccttccccacacagccccagaagggtcccagagctgaccccactccaggacctaggcccagcccctcagcctcatctggagcccctgaagaccagtcccacccacctttctggcctcatctgacactgctccgcatcctgctgtgtgtcctgttccatgttccggttccatccaaatacactttctggaacaaa

SEQ ID NO: 36 - DNA, 110 bp, Unknown
  Description of Unknown: Untranslated Region Sequence
gctggagcctcggtggccatgcttcttgccccttgggcctccccccagcccctcctccccttcctgcacccgtacccccgtggtctttgaataaagtctgagtgggcggc

SEQ ID NO: 37 - protein, 176 aa, Homo sapiens
MRIFAVFIFMTYWHLLNAPYNKINQRILVVDPVTSEHELTCQAEGYPKAEVIWTSSDHQVLSGKTTTTNSKREEKLFNVTSTLRINTTTNEIFYCTFRRLDPEENHTAELVIPELPLAHPPNERTHLVILGAILLCLGVALTFIFRLRKGRMMDVKKCGIQDTNSKKQSDTHLEET

SEQ ID NO: 38 - protein, 290 aa, Homo sapiens
MRIFAVFIFMTYWHLLNAFTVTVPKDLYVVEYGSNMTIECKFPVEKQLDLAALIVYWEMEDKNIIQFVHGEEDLKVQHSSYRQRARLLKDQLSLGNAALQITDVKLQDAGVYRCMISYGGADYKRITVKVNAPYNKINQRILVVDPVTSEHELTCQAEGYPKAEVIWTSSDHQVLSGKTTTTNSKREEKLFNVTSTLRINTTTNEIFYCTFRRLDPEENHTAELVIPELPLAHPPNERTHLVILGAILLCLGVALTFIFRLRKGRMMDVKKCGIQDTNSKKQSDTHLEET

SEQ ID NO: 39 - protein, 203 aa, Homo sapiens
MVRLPLQCVLWGCLLTAVHPEPPTACREKQYLINSQCCSLCQPGQKLVSDCTEFTETECLPCGESEFLDTWNRETHCHQHKYCDPNLGLRVQQKGTSETDTICTCEEGWHCTSEACESCVLHRSCSPGFGVKQIATGVSDTICEPCPVGFFSNVSSAFEKCHPWTRSPGSAESPGGDPHHLRDPVCHPLGAGLYQKGGQEANQ

SEQ ID NO: 40 - protein, 261 aa, Homo sapiens
GRSPLRTRDRVLTNWEDGLTVAYGAVKLIQSLSLQPVGWQQNWGLSSPPTMLLPSRAQSPTELPLAPLAEPNTGCSSLLSWHSTRGELHLWALGLGQMGGSKCGSPLSPLAPTLEALRRPWCGQQGAGGTRGISTDPPSGKGGRAWGRDPLPREGLLRGTAAPAAGGDLTPCLSRPPTPSRNPRRSIFPTIFLAPTLLLQCRRLYMDANRSPRRMAKRVASQCRRDSEAAPTQECGHVGKQAVGQRAWCCCCCGVRVRGWH

SEQ ID NO: 41 - protein, 277 aa, Homo sapiens
MVRLPLQCVLWGCLLTAVHPEPPTACREKQYLINSQCCSLCQPGQKLVSDCTEFTETECLPCGESEFLDTWNRETHCHQHKYCDPNLGLRVQQKGTSETDTICTCEEGWHCTSEACESCVLHRSCSPGFGVKQIATGVSDTICEPCPVGFFSNVSSAFEKCHPWTSCETKDLVVQQAGTNKTDVVCGPQDRLRALVVIPIIFGILFAILLVLVFIKKVAKKPTNKAPHPKQEPQEINFPDDLPGSNTAAPVQETLHGCQPVTQEDGKESRISVQERQ

SEQ ID NO: 42 - protein, 240 aa, Homo sapiens
MIETYNQTSPRSAATGLPISMKIFMYLLTVFLITQMIGSALFAVYLHRRLDKIEDERNLHEDFVFMKTIQRCNTGERSLSLLNCEEIKSQFEGFVKDIMLNKEETKKENSFEMQKVLQWAEKGYYTMSNNLVTLENGKQLTVKRQGLYYIYAQVTFCSNREASSQAPFIASLCLKSPGRFERILLRAANTHSSAKPCGQQSIHLGGVFELQPGASVFVNVTDPSQVSHGTGFTSFGLLKL

SEQ ID NO: 43 - protein, 261 aa, Homo sapiens
MIETYNQTSPRSAATGLPISMKIFMYLLTVFLITQMIGSALFAVYLHRRLDKIEDERNLHEDFVFMKTIQRCNTGERSLSLLNCEEIKSQFEGFVKDIMLNKEETKKENSFEMQKGDQNPQIAAHVISEASSKTTSVLQWAEKGYYTMSNNLVTLENGKQLTVKRQGLYYIYAQVTFCSNREASSQAPFIASLCLKSPGRFERILLRAANTHSSAKPCGQQSIHLGGVFELQPGASVFVNVTDPSQVSHGTGFTSFGLLKL

SEQ ID NO: 44 - protein, 116 aa, Artificial sequence
  Description of Artificial Sequence: Synthetic Protein Sequence
EVQLLESGGGLVQPGGSLRLSCAASGFTFSNYQMAWVRQAPGKGLEWVSSITSEGGSTYYADSVKGRFTISRDNSKNTLYLQMNSLRAEDTAVYYCAKPGKNFDYWGQGTLVTVSS

SEQ ID NO: 45 - protein, 228 aa, Artificial sequence
  Description of Artificial Sequence: Synthetic Protein Sequence
SKYGPPQPSQPAPEFLGGPSVFLFPPKPKDTLMISRTPEVTCVVVDVSQEDPEVQFNWYVDGVEVHNAKTKPREEQFQSTYRVVSVLTVLHQDWLNGKEYKCKVSNKGLPSSIEKTISKAKGQPREPQVYTLPPSQEEMTKNQVSLTCLVKGFYPSDIAVEWESNGQPENNYKTDPPVLDSDGSFFLYSRLTVDKSRWQEGNVFSCSVMHEALHNHYTQKSLSLSLGK

SEQ ID NO: 46 - protein, 129 aa, Artificial sequence
  Description of Artificial Sequence: Synthetic Protein Sequence
VALHRPDVYLLPPAREQLNLRESATITCLVTGFSPADVFVQWMQRGQPLSPEKYVTSAPMPEPQAPGRYFAHSILTVSEEEWNTGETYTCVAHEALPNRVTERTVDKSTGKPTLYNVSLVMSDTAGTCY

SEQ ID NO: 47 - protein, 394 aa, Artificial sequence
  Description of Artificial Sequence: Synthetic Protein Sequence
METDTLLLWVLLLWVPGSTGDYKDDDDKEVQLLESGGGLVQPGGSLRLSCAASGFTFSNYQMAWVRQAPGKGLEWVSSITSEGGSTYYADSVKGRFTISRDNSKNTLYLQMNSLRAEDTAVYYCAKPGKNFDYWGQGTLVTVSSSKYGPPQPSQPAPEFLGGPSVFLFPPKPKDTLMISRTPEVTCVVVDVSQEDPEVQFNWYVDGVEVHNAKTKPREEQFQSTYRVVSVLTVLHQDWLNGKEYKCKVSNKGLPSSIEKTISKAKGQPREPQVYTLPPSQEEMTKNQVSLTCLVKGFYPSDIAVEWESNGQPENNYKTDPPVLDSDGSFFLYSRLTVDKSRWQEGNVFSCSVMHEALHNHYTQKSLSLSLGKSTGKPTLYNVSLVMSDTAGTCY

SEQ ID NO: 48 - protein, 372 aa, Artificial sequence
  Description of Artificial Sequence: Synthetic Protein Sequence
METDTLLLWVLLLWVPGSTGDYKDDDDKEVQLLESGGGLVQPGGSLRLSCAASGFTFSNYQMAWVRQAPGKGLEWVSSITSEGGSTYYADSVKGRFTISRDNSKNTLYLQMNSLRAEDTAVYYCAKPGKNFDYWGQGTLVTVSSSKYGPPQPSQPAPEFLGGPSVFLFPPKPKDTLMISRTPEVTCVVVDVSQEDPEVQFNWYVDGVEVHNAKTKPREEQFQSTYRVVSVLTVLHQDWLNGKEYKCKVSNKGLPSSIEKTISKAKGQPREPQVYTLPPSQEEMTKNQVSLTCLVKGFYPSDIAVEWESNGQPENNYKTDPPVLDSDGSFFLYSRLTVDKSRWQEGNVFSCSVMHEALHNHYTQKSLSLSLGK

SEQ ID NO: 49 - protein, 1722 aa, Homo sapiens
MRTGWATPRRPAGLLMLLFWFFDLAEPSGRAANDPFTIVHGNTGKCIKPVYGWIVADDCDETEDKLWKWVSQHRLFHLHSQKCLGLDITKSVNELRMFSCDSSAMLWWKCEHHSLYGAARYRLALKDGHGTAISNASDVWKKGGSEESLCDQPYHEIYTRDGNSYGRPCEFPFLIDGTWHHDCILDEDHSGPWCATTLNYEYDRKWGICLKPENGCEDNWEKNEQFGSCYQFNTQTALSWKEAYVSCQNQGADLLSINSAAELTYLKEKEGIAKIFWIGLNQLYSARGWEWSDHKPLNFLNWDPDRPSAPTIGGSSCARMDAESGLWQSFSCEAQLPYVCRKPLNNTVELTDVWTYSDTRCDAGWLPNNGFCYLLVNESNSWDKAHAKCKAFSSDLISIHSLADVEVVVTKLHNEDIKEEVWIGLKNINIPTLFQWSDGTEVTLTYWDENEPNVPYNKTPNCVSYLGELGQWKVQSCEEKLKYVCKRKGEKLNDASSDKMCPPDEGWKRHGETCYKIYEDEVPFGTNCNLTITSRFEQEYLNDLMKKYDKSLRKYFWTGLRDVDSCGEYNWATVGGRRRAVTFSNWNFLEPASPGGCVAMSTGKSVGKWEVKDCRSFKALSICKKMSGPLGPEEASPKPDDPCPEGWQSFPASLSCYKVFHAERIVRKRNWEEAERFCQALGAHLSSFSHVDEIKEFLHFLTDQFSGQHWLWIGLNKRSPDLQGSWQWSDRTPVSTIIMPNEFQQDYDIRDCAAVKVFHRPWRRGWHFYDDREFIYLRPFACDTKLEWVCQIPKGRTPKTPDWYNPDRAGIHGPPLIIEGSEYWFVADLHLNYEEAVLYCASNHSFLATITSFVGLKAIKNKIANISGDGQKWWIRISEWPIDDHFTYSRYPWHRFPVTFGEECLYMSAKTWLIDLGKPTDCSTKLPFICEKYNVSSLEKYSPDSAAKVQCSEQWIPFQNKCFLKIKPVSLTFSQASDTCHSYGGTLPSVLSQIEQDFITSLLPDMEATLWIGLRWTAYEKINKWTDNRELTYSNFHPLLVSGRLRIPENFFEEESRYHCALILNLQKSPFTGTWNFTSCSERHFVSLCQKYSEVKSRQTLQNASETVKYLNNLYKIIPKTLTWHSAKRECLKSNMQLVSITDPYQQAFLSVQALLHNSSLWIGLFSQDDELNFGWSDGKRLHFSRWAETNGQLEDCVVLDTDGFWKTVDCNDNQPGAICYYSGNETEKEVKPVDSVKCPSPVLNTPWIPFQNCCYNFIITKNRHMATTQDEVHTKCQKLNPKSHILSIRDEKENNFVLEQLLYFNYMASWVMLGITYRNKSLMWFDKTPLSYTHWRAGRPTIKNEKFLAGLSTDGFWDIQTFKVIEEAVYFHQHSILACKIEMVDYKEEYNTTLPQFMPYEDGIYSVIQKKVTWYEALNMCSQSGGHLASVHNQNGQLFLEDIVKRDGFPLWVGLSSHDGSESSFEWSDGSTFDYIPWKGQTSPGNCVLLDPKGTWKHEKCNSVKDGAICYKPTKSKKLSRLTYSSRCPAAKENGSRWIQYKGHCYKSDQALHSFSEAKKLCSKHDHSATIVSIKDEDENKFVSRLMRENNNITMRVWLGLSQHSVDQSWSWLDGSEVTFVKWENKSKSGVGRCSMLIASNETWKKVECEHGFGRVVCKVPLGPDYTAIAIIVATLSILVLMGGLIWFLFQRHRLHLAGFSSVRYAQGVNEDEIMLPSFHD

SEQ ID NO: 50 - protein, 1817 aa, Homo sapiens
MRTGWATPRRPAGLLMLLFWFFDLAEPSGRAANDPFTIVHGNTGKCIKPVYGWIVADDCDETEDKLWKWVSQHRLFHLHSQKCLGLDITKSVNELRMFSCDSSAMLWWKCEHHSLYGAARYRLALKDGHGTAISNASDVWKKGGSEESLCDQPYHEIYTRDGNSYGRPCEFPFLIDGTWHHDCILDEDHSGPWCATTLNYEYDRKWGICLKPENGCEDNWEKNEQFGSCYQFNTQTALSWKEAYVSCQNQGADLLSINSAAELTYLKEKEGIAKIFWIGLNQLYSARGWEWSDHKPLNFLNWDPDRPSAPTIGGSSCARMDAESGLWQSFSCEAQLPYVCRKPLNNTVELTDVWTYSDTRCDAGWLPNNGFCYLLVNESNSWDKAHAKCKAFSSDLISIHSLADVEVVVTKLHNEDIKEEVWIGLKNINIPTLFQWSDGTEVTLTYWDENEPNVPYNKTPNCVSYLGELGQWKVQSCEEKLKYVCKRKGEKLNDASSDKMCPPDEGWKRHGETCYKIYEDEVPFGTNCNLTITSRFEQEYLNDLMKKYDKSLRKYFWTGLRDVDSCGEYNWATVGGRRRAVTFSNWNFLEPASPGGCVAMSTGKSVGKWEVKDCRSFKALSICKKMSGPLGPEEASPKPDDPCPEGWQSFPASLSCYKVFHAERIVRKRNWEEAERFCQALGAHLSSFSHVDEIKEFLHFLTDQFSGQHWLWIGLNKRSPDLQGSWQWSDRTPVSTIIMPNEFQQDYDIRDCAAVKVFHRPWRRGWHFYDDREFIYLRPFACDTKLEWVCQIPKGRTPKTPDWYNPDRAGIHGPPLIIEGSEYWFVADLHLNYEEAVLYCASNHSFLATITSFVGLKAIKNKIANISGDGQKWWIRISEWPIDDHFTYSRYPWHRFPVTFGEECLYMSAKTWLIDLGKPTDCSTKLPFICEKYNVSSLEKYSPDSAAKVQCSEQWIPFQNKCFLKIKPVSLTFSQASDTCHSYGGTLPSVLSQIEQDFITSLLPDMEATLWIGLRWTAYEKINKWTDNRELTYSNFHPLLVSGRLRIPENFFEEESRYHCALILNLQKSPFTGTWNFTSCSERHFVSLCQKYSEVKSRQTLQNASETVKYLNNLYKIIPKTLTWHSAKRECLKSNMQLVSITDPYQQAFLSVQALLHNSSLWIGLFSQDDELNFGWSDGKRLHFSRWAETNGQLEDCVVLDTDGFWKTVDCNDNQPGAICYYSGNETEKEVKPVDSVKCPSPVLNTPWIPFQNCCYNFIITKNRHMATTQDEVHTKCQKLNPKSHILSIRDEKENNFVLEQLLYFNYMASWVMLGITYRNKSLMWFDKTPLSYTHWRAGRPTIKNEKFLAGLSTDGFWDIQTFKVIEEAVYFHQHSILACKIEMVDYKEEYNTTLPQFMPYEDGIYSVIQKKVTWYEALNMCSQSGGHLASVHNQNGQLFLEDIVKRDGFPLWVGLSSHDGSESSFEWSDGSTFDYIPWKGQTSPGNCVLLDPKGTWKHEKCNSVKDGAICYKPTKSKKLSRLTYSSRCPAAKENGSRWIQYKGHCYKSDQALHSFSEAKKLCSKHDHSATIVSIKDEDENKFVSRLMRENNNITMRVWLGLSQHSVDCPSSTWIQFQDSCYIFLQEAIKVESIEDVRNQCTDHGADMISIHNEEENAFILDTLKKQWKGPDDILLGMFYDTDDASFKWFDNSNMTFDKWTDQDDDEDLVDTCAFLHIKTGEWKKGNCEVSSVEGTLCKTAIPYKRKYLSDNHILISALVIASTVILTVLGAIIWFLYKKHSDSRFTTVFSTAPQSPYNEDCVLVVGEENEYPVQFD

SEQ ID NO: 51 - protein, 1873 aa, Homo sapiens
MRTGWATPRRPAGLLMLLFWFFDLAEPSGRAANDPFTIVHGNTGKCIKPVYGWIVADDCDETEDKLWKWVSQHRLFHLHSQKCLGLDITKSVNELRMFSCDSSAMLWWKCEHHSLYGAARYRLALKDGHGTAISNASDVWKKGGSEESLCDQPYHEIYTRDGNSYGRPCEFPFLIDGTWHHDCILDEDHSGPWCATTLNYEYDRKWGICLKPENGCEDNWEKNEQFGSCYQFNTQTALSWKEAYVSCQNQGADLLSINSAAELTYLKEKEGIAKIFWIGLNQLYSARGWEWSDHKPLNFLNWDPDRPSAPTIGGSSCARMDAESGLWQSFSCEAQLPYVCRKPLNNTVELTDVWTYSDTRCDAGWLPNNGFCYLLVNESNSWDKAHAKCKAFSSDLISIHSLADVEVVVTKLHNEDIKEEVWIGLKNINIPTLFQWSDGTEVTLTYWDENEPNVPYNKTPNCVSYLGELGQWKVQSCEEKLKYVCKRKGEKLNDASSDKMCPPDEGWKRHGETCYKIYEDEVPFGTNCNLTITSRFEQEYLNDLMKKYDKSLRKYFWTGLRDVDSCGEYNWATVGGRRRAVTFSNWNFLEPASPGGCVAMSTGKSVGKWEVKDCRSFKALSICKKMSGPLGPEEASPKPDDPCPEGWQSFPASLSCYKVFHAERIVRKRNWEEAERFCQALGAHLSSFSHVDEIKEFLHFLTDQFSGQHWLWIGLNKRSPDLQGSWQWSDRTPVSTIIMPNEFQQDYDIRDCAAVKVFHRPWRRGWHFYDDREFIYLRPFACDTKLEWVCQIPKGRTPKTPDWYNPDRAGIHGPPLIIEGSEYWFVADLHLNYEEAVLYCASNHSFLATITSFVGLKAIKNKIANISGDGQKWWIRISEWPIDDHFTYSRYPWHRFPVTFGEECLYMSAKTWLIDLGKPTDCSTKLPFICEKYNVSSLEKYSPDSAAKVQCSEQWIPFQNKCFLKIKPVSLTFSQASDTCHSYGGTLPSVLSQIEQDFITSLLPDMEATLWIGLRWTAYEKINKWTDNRELTYSNFHPLLVSGRLRIPENFFEEESRYHCALILNLQKSPFTGTWNFTSCSERHFVSLCQKYSEVKSRQTLQNASETVKYLNNLYKIIPKTLTWHSAKRECLKSNMQLVSITDPYQQAFLSVQALLHNSSLWIGLFSQDDELNFGWSDGKRLHFSRWAETNGQLEDCVVLDTDGFWKTVDCNDNQPGAICYYSGNETEKEVKPVDSVKCPSPVLNTPWIPFQNCCYNFIITKNRHMATTQDEVHTKCQKLNPKSHILSIRDEKENNFVLEQLLYFNYMASWVMLGITYRNKSLMWFDKTPLSYTHWRAGRPTIKNEKFLAGLSTDGFWDIQTFKVIEEAVYFHQHSILACKIEMVDYKEEYNTTLPQFMPYEDGIYSVIQKKVTWYEALNMCSQSGGHLASVHNQNGQLFLEDIVKRDGFPLWVGLSSHDGSESSFEWSDGSTFDYIPWKGQTSPGNCVLLDPKGTWKHEKCNSVKDGAICYKPTKSKKLSRLTYSSRCPAAKENGSRWIQYKGHCYKSDQALHSFSEAKKLCSKHDHSATIVSIKDEDENKFVSRLMRENNNITMRVWLGLSQHSVDQSWSWLDGSEVTFVKWENKSKSGVGRCSMLIASNETWKKVECEHGFGRVVCKVPLDCPSSTWIQFQDSCYIFLQEAIKVESIEDVRNQCTDHGADMISIHNEEENAFILDTLKKQWKGPDDILLGMFYDTDDASFKWFDNSNMTFDKWTDQDDDEDLVDTCAFLHIKTGEWKKGNCEVSSVEGTLCKTAIPYKRKYLSDNHILISALVIASTVILTVLGAIIWFLYKKHSDSRFTTVFSTAPQSPYNEDCVLVVGEENEYPVQFD

SEQ ID NO: 52 - protein, 61 aa, Homo sapiens
MKRFLFLLLTISLLVMVQIQTGLSGQNDTSQTSSPSASSNISGGIFLFFVANAIIHLFCFS

SEQ ID NO: 53 - protein, 235 aa, Homo sapiens
MTVLAPAWSPTTYLLLLLLLSSGLSGTQDCSFQHSPISSDFAVKIRELSDYLLQDYPVTVASNLQDEELCGGLWRLVLAQRWMERLKTVAGSKMQGLLERVNTEIHFVTKCAFQPPPSCLRFVQTNISRLLQETSEQLVALKPWITRQNFSRCLELQCQPDSSTLPPPWSPRPLEATAPTAPQPPLLLLLLLPVGLLLLAAAWCLHWQRTRRRTPRPGEQVPPVPSPQDLLLVEH

SEQ ID NO: 54 - protein, 178 aa, Homo sapiens
MTVLAPAWSPTTYLLLLLLLSSGLSGTQDCSFQHSPISSDFAVKIRELSDYLLQDYPVTVASNLQDEELCGGLWRLVLAQRWMERLKTVAGSKMQGLLERVNTEIHFVTKCAFQPPPSCLRFVQTNISRLLQETSEQLVALKPWITRQNFSRCLELQCQPVETVFHRVSQDGLDLLTS

SEQ ID NO: 55 - protein, 235 aa, Homo sapiens; identical to SEQ ID NO: 53

SEQ ID NO: 56 - protein, 135 aa, Homo sapiens
MACGLVASNLNLKPGECLRVRGEVAPDAKSFVLNLGKDSNNLCLHFNPRFNAHGDANTIVCNSKDGGAWGTEQREAVFPFQPGSVAEVCITFDQANLTVKLPDGYEFKFPNRLNLEAINYMAADGDFKIKCVAFD

SEQ ID NO: 57 - protein, 662 aa, Homo sapiens
MRPQILLLLALLTLGLAAQHQDKVPCKMVDKKVSCQVLGLLQVPSVLPPDTETLDLSGNQLRSILASPLGFYTALRHLDLSTNEISFLQPGAFQALTHLEHLSLAHNRLAMATALSAGGLGPLPRVTSLDLSGNSLYSGLLERLLGEAPSLHTLSLAENSLTRLTRHTFRDMPALEQLDLHSNVLMDIEDGAFEGLPRLTHLNLSRNSLTCISDFSLQQLRVLDLSCNSIEAFQTASQPQAEFQLTWLDLRENKLLHFPDLAALPRLIYLNLSNNLIRLPTGPPQDSKGIHAPSEGWSALPLSAPSGNASGRPLSQLLNLDLSYNEIELIPDSFLEHLTSLCFLNLSRNCLRTFEARRLGSLPCLMLLDLSHNALETLELGARALGSLRTLLLQGNALRDLPPYTFANLASLQRLNLQGNRVSPCGGPDEPGPSGCVAFSGITSLRSLSLVDNEIELLRAGAFLHTPLTELDLSSNPGLEVATGALGGLEASLEVLALQGNGLMVLQVDLPCFICLKRLNLAENRLSHLPAWTQAVSLEVLDLRNNSFSLLPGSAMGGLETSLRRLYLQGNPLSCCGNGWLAAQLHQGRVDVDATQDLICRFSSQEEVSLSHVRPEDCEKGGLKNINLIIILTFILVSAILLTTLAACCCVRRQKFNQQYKA

SEQ ID NO: 58 - protein, 662 aa, Homo sapiens; identical to SEQ ID NO: 57

SEQ ID NO: 59 - protein, 662 aa, Homo sapiens; identical to SEQ ID NO: 57

SEQ ID NO: 60 - protein, 186 aa, Homo sapiens
MRPQILLLLALLTLGLAAQHQDKVPCKMVDKKVSCQVLGLLQVPSVLPPDTETLDLSGNQLRSILASPLGFYTALRHLDLSTNEISFLQPGAFQALTHLEHLSLAHNRLAMATALSAGGLGPLPRVTSLDLSGNSLYSGLLERLLGEAPSLHTLSLAENSLTRLTRHTFRDMPALEQLDLHSNVLM

SEQ ID NO: 61 - protein, 403 aa, Homo sapiens [sequence omitted]

SEQ ID NO: 62 - protein, 78 aa, Homo sapiens
MAHAMENSWTISKEYHIDEEVGFALPNPQENLPDFYNDWMFIAKHLPDLIESGQLRERVEKLNMLSIDHLTDHKSQRL

SEQ ID NO: 63 - protein, 180 aa, Homo sapiens
MAHAMENSWTISKEYHIDEEVGFALPNPQENLPDFYNDWMFIAKHLPDLIESGQLRERVEKLNMLSIDHLTDHKSQRLARLVLGCITMAYVWGKGHGDVRKVLPRNIAVPYCQLSKKLELPPILVYADCVLANWKKKDPNKPLTYENMDVLFSFRDGDCSKGFFLVSLLVEIAAASAIKV

SEQ ID NO: 64 - protein, 403 aa, Homo sapiens [sequence omitted]

SEQ ID NO: 65 - protein, 47 aa, Homo sapiens
MAHAMENSWTISKEYHIDEEVGFALPNPQENLPDFYNDWMFIAKHLP

SEQ ID NO: 66 - protein, 407 aa, Homo sapiens
MEPHRPNVKTAVPLSLESYHISEEYGFLLPDSLKELPDHYRPWMEIANKLPQLIDAHQLQAHVDKMPLLSCQFLKGHREQRLAHLVLSFLTMGYVWQEGEAQPAEVLPRNLALPFVEVSRNLGLPPILVHSDLVLTNWTKKDPDGFLEIGNLETIISFPGGESLHGFILVTALVEKEAVPGIKALVQATNAILQPNQEALLQALQRLRLSIQDITKTLGQMHDYVDPDIFYAGIRIFLSGWKDNPAMPAGLMYEGVSQEPLKYSGGSAAQSTVLHAFDEFLGIRHSKESGDFLYRMRDYMPPSHKAFIEDIHSAPSLRDYILSSGQDHLLTAYNQCVQALAELRSYHITMVTKYLITAAAKAKHGKPNHLPGPPQALKDRGTGGTAVMSFLKSVRDKTLESILHPRG

SEQ ID NO: 67 - protein, 420 aa, Homo sapiens
MLHFHYYDTSNKIMEPHRPNVKTAVPLSLESYHISEEYGFLLPDSLKELPDHYRPWMEIANKLPQLIDAHQLQAHVDKMPLLSCQFLKGHREQRLAHLVLSFLTMGYVWQEGEAQPAEVLPRNLALPFVEVSRNLGLPPILVHSDLVLTNWTKKDPDGFLEIGNLETIISFPGGESLHGFILVTALVEKEAVPGIKALVQATNAILQPNQEALLQALQRLRLSIQDITKTLGQMHDYVDPDIFYAGIRIFLSGWKDNPAMPAGLMYEGVSQEPLKYSGGSAAQSTVLHAFDEFLGIRHSKESGDFLYRMRDYMPPSHKAFIEDIHSAPSLRDYILSSGQDHLLTAYNQCVQALAELRSYHITMVTKYLITAAAKAKHGKPNHLPGPPQALKDRGTGGTAVMSFLKSVRDKTLESILHPRG

SEQ ID NO: 68 - protein, 178 aa, Homo sapiens
MHSSALLCCLVLLTGVRASPGQGTQSENSCTHFPGNLPNMLRDLRDAFSRVKTFFQMKDQLDNLLLKESLLEDFKGYLGCQALSEMIQFYLEEVMPQAENQDPDIKAHVNSLGENLKTLRLRLRRCHRFLPCENKSKAVEQVKNAFNKLQEKGIYKAMSEFDIFINYIEAYMTMKIRN

SEQ ID NO: 69 - protein, 253 aa, Homo sapiens
MWPPGSASQPPPSPAAATGLHPAARPVSLQCRLSMCPARSLLLVATLVLLDHLSLARNLPVATPDPGMFPCLHHSQNLLRAVSNMLQKARQTLEFYPCTSEEIDHEDITKDKTSTVEACLPLELTKNESCLNSRETSFITNGSCLASRKTSFMMALCLSSIYEDLKMYQVEFKTMNAKLLMDPKRQIFLDQNMLAVIDELMQALNFNSETVPQKSSLEEPDFYKTKIKLCILLHAFRIRAVTIDRVMSYLNAS

SEQ ID NO: 70 - protein, 239 aa, Homo sapiens
MWPPGSASQPPPSPAAATGLHPAARPVSLQCRLSMCPARSLLLVATLVLLDHLSLARNLPVATPDPGMFPCLHHSQNLLRAVSNMLQKARQTLEFYPCTSEEIDHEDITKDKTSTVEACLPLELTKNGSCLASRKTSFMMALCLSSIYEDLKMYQVEFKTMNAKLLMDPKRQIFLDQNMLAVIDELMQALNFNSETVPQKSSLEEPDFYKTKIKLCILLHAFRIRAVTIDRVMSYLNAS

SEQ ID NO: 71 - protein, 215 aa, Homo sapiens
MWPPGSASQPPPSPAAATGLHPAARPVSLQCRLSMCPARSLLLVATLVLLDHLSLARNLPVATPDPGMFPCLHHSQNLLRAVSNMLQKNESCLNSRETSFITNGSCLASRKTSFMMALCLSSIYEDLKMYQVEFKTMNAKLLMDPKRQIFLDQNMLAVIDELMQALNFNSETVPQKSSLEEPDFYKTKIKLCILLHAFRIRAVTIDRVMSYLNAS

SEQ ID NO: 72 - protein, 219 aa, Homo sapiens
MCPARSLLLVATLVLLDHLSLARNLPVATPDPGMFPCLHHSQNLLRAVSNMLQKARQTLEFYPCTSEEIDHEDITKDKTSTVEACLPLELTKNESCLNSRETSFITNGSCLASRKTSFMMALCLSSIYEDLKMYQVEFKTMNAKLLMDPKRQIFLDQNMLAVIDELMQALNFNSETVPQKSSLEEPDFYKTKIKLCILLHAFRIRAVTIDRVMSYLNAS

SEQ ID NO: 73 - protein, 229 aa, Homo sapiens
MTPQLLLALVLWASCPPCSGRKGPPAALTLPRVQCRASRYPIAVDCSWTLPPAPNSTSPVSFIATYRLGMAARGHSWPCLQQTPTSTSCTITDVQLFSMAPYVLNVTAVHPWGSSSSFVPFITEHIIKPDPPEGVRLSPLAERQLQVQWEPPGSWPFPEIFSLKYWIRYKRQGAARFHRVGPIEATSFILRAVRPRARYYVQVAAQDLTDYGELSDWSLPATATMSLGK

SEQ ID NO: 74 - protein, 209 aa, Homo sapiens
RKGPPAALTLPRVQCRASRYPIAVDCSWTLPPAPNSTSPVSFIATYRLGMAARGHSWPCLQQTPTSTSCTITDVQLFSMAPYVLNVTAVHPWGSSSSFVPFITEHIIKPDPPEGVRLSPLAERQLQVQWEPPGSWPFPEIFSLKYWIRYKRQGAARFHRVGPIEATSFILRAVRPRARYYVQVAAQDLTDYGELSDWSLPATATMSLGK

SEQ ID NO: 75 - protein, 455 aa, Artificial Sequence
  Description of Artificial Sequence: Synthetic Protein Sequence
MCPARSLLLVATLVLLDHLSLARNLPVATPDPGMFPCLHHSQNLLRAVSNMLQKARQTLEFYPCTSEEIDHEDITKDKTSTVEACLPLELTKNESCLNSRETSFITNGSCLASRKTSFMMALCLSSIYEDLKMYQVEFKTMNAKLLMDPKRQIFLDQNMLAVIDELMQALNFNSETVPQKSSLEEPDFYKTKIKLCILLHAFRIRAVTIDRVMSYLNASGSGATNFSLLKQAGDVEEPGPRKGPPAALTLPRVQCRASRYPIAVDCSWTLPPAPNSTSPVSFIATYRLGMAARGHSWPCLQQTPTSTSCTITDVQLFSMAPYVLNVTAVHPWGSSSSFVPFITEHIIKPDPPEGVRLSPLAERQLQVQWEPPGSWPFPEIFSLKYWIRYKRQGAARFHRVGPIEATSFILRAVRPRARYYVQVAAQDLTDYGELSDWSLPATATMSLGKHHHHHH

SEQ ID NO: 76 - protein, 452 aa, Artificial Sequence
  Description of Artificial Sequence: Synthetic Protein Sequence
MCPARSLLLVATLVLLDHLSLARNLPVATPDPGMFPCLHHSQNLLRAVSNMLQKARQTLEFYPCTSEEIDHEDITKDKTSTVEACLPLELTKNESCLNSRETSFITNGSCLASRKTSFMMALCLSSIYEDLKMYQVEFKTMNAKLLMDPKRQIFLDQNMLAVIDELMQALNFNSETVPQKSSLEEPDFYKTKIKLCILLHAFRIRAVTIDRVMSYLNASGGGSGGGSGGGSGGGSRKGPPAALTLPRVQCRASRYPIAVDCSWTLPPAPNSTSPVSFIATYRLGMAARGHSWPCLQQTPTSTSCTITDVQLFSMAPYVLNVTAVHPWGSSSSFVPFITEHIIKPDPPEGVRLSPLAERQLQVQWEPPGSWPFPEIFSLKYWIRYKRQGAARFHRVGPIEATSFILRAVRPRARYYVQVAAQDLTDYGELSDWSLPATATMSLGKDYKDDDDK

SEQ ID NO: 77 - protein, 669 aa, Artificial Sequence
  Description of Artificial Sequence: Synthetic Protein Sequence
MTPQLLLALVLWASCPPCSGRKGPPAALTLPRVQCRASRYPIAVDCSWTLPPAPNSTSPVSFIATYRLGMAARGHSWPCLQQTPTSTSCTITDVQLFSMAPYVLNVTAVHPWGSSSSFVPFITEHIIKPDPPEGVRLSPLAERQLQVQWEPPGSWPFPEIFSLKYWIRYKRQGAARFHRVGPIEATSFILRAVRPRARYYVQVAAQDLTDYGELSDWSLPATATMSLGKGGGSGGGSGGGSGGGSRNLPVATPDPGMFPCLHHSQNLLRAVSNMLQKARQTLEFYPCTSEEIDHEDITKDKTSTVEACLPLELTKNESCLNSRETSFITNGSCLASRKTSFMMALCLSSIYEDLKMYQVEFKTMNAKLLMDPKRQIFLDQNMLAVIDELMQALNFNSETVPQKSSLEEPDFYKTKIKLCILLHAFRIRAVTIDRVMSYLNASDKTHTCPPCPAPELLGGPSVFLFPPKPKDQLMISRTPEVTCVVVDVSHEDPEVKFNWYVDGVEVHNAKTKPREEQYNSTYRVVSVLTVLHQDWLNGKEYKCKVSNKALPAPIEKTISKAKGQPREPQVYTLPPSREEMTKNQVSLTCLVKGFYPSDIAVEWESNGQPENNYKTTPPVLDSDGSFFLYSKLTVDKSRWQQGNVFSCSVLHEALHNHYTQKSLSLSPGK

SEQ ID NO: 78 - protein, 218 aa, Homo sapiens
MSFVGENSGVKMGSEDWEKDEPQCCLEDPAGSPLEPGPSLPTMNFVHTSPKVKNLNPKKFSIHDQDHKVLVLDSGNLIAVPDKNYIRPEIFFALASSLSSASAEKGSPILLGVSKGEFCLYCDKDKGQSHPSLQLKKEKLMKLAAQKESARRPFIFYRAQVGSWNMLESAAHPGWFICTSCNCNEPVGVTDKFENRKHIEFSFQPVCKAEMSPSEVSD

SEQ ID NO: 79 - protein, 192 aa, Homo sapiens
MSGCDRRETETKGKNSFKKRLRGPKVKNLNPKKFSIHDQDHKVLVLDSGNLIAVPDKNYIRPEIFFALASSLSSASAEKGSPILLGVSKGEFCLYCDKDKGQSHPSLQLKKEKLMKLAAQKESARRPFIFYRAQVGSWNMLESAAHPGWFICTSCNCNEPVGVTDKFENRKHIEFSFQPVCKAEMSPSEVSD

SEQ ID NO: 80 - protein, 157 aa, Homo sapiens
MSFVGENSGVKMGSEDWEKDEPQCCLEEIFFALASSLSSASAEKGSPILLGVSKGEFCLYCDKDKGQSHPSLQLKKEKLMKLAAQKESARRPFIFYRAQVGSWNMLESAAHPGWFICTSCNCNEPVGVTDKFENRKHIEFSFQPVCKAEMSPSEVSD

SEQ ID NO: 81 - protein, 197 aa, Homo sapiens
MSFVGENSGVKMGSEDWEKDEPQCCLEGPKVKNLNPKKFSIHDQDHKVLVLDSGNLIAVPDKNYIRPEIFFALASSLSSASAEKGSPILLGVSKGEFCLYCDKDKGQSHPSLQLKKEKLMKLAAQKESARRPFIFYRAQVGSWNMLESAAHPGWFICTSCNCNEPVGVTDKFENRKHIEFSFQPVCKAEMSPSEVSD

SEQ ID NO: 82 - protein, 178 aa, Homo sapiens
MSFVGENSGVKMGSEDWEKDEPQCCLEDPAGSPLEPGPSLPTMNFVHTKIFFALASSLSSASAEKGSPILLGVSKGEFCLYCDKDKGQSHPSLQLKKEKLMKLAAQKESARRPFIFYRAQVGSWNMLESAAHPGWFICTSCNCNEPVGVTDKFENRKHIEFSFQPVCKAEMSPSEVSD

SEQ ID NO: 83 - protein, 447 aa, Homo sapiens
MIPTFTALLCLGLSLGPRTHMQAGPLPKPTLWAEPGSVISWGNSVTIWCQGTLEAREYRLDKEESPAPWDRQNPLEPKNKARFSIPSMTEDYAGRYRCYYRSPVGWSQPSDPLELVMTGAYSKPTLSALPSPLVTSGKSVTLLCQSRSPMDTFLLIKERAAHPLLHLRSEHGAQQHQAEFPMSPVTSVHGGTYRCFSSHGFSHYLLSHPSDPLELIVSGSLEDPRPSPTRSVSTAAGPEDQPLMPTGSVPHSGLRRHWEVLIGVLVVSILLLSLLLFLLLQHWRQGKHRTLAQRQADFQRPPGAAEPEPKDGGLQRRSSPAADVQGENFCAAVKNTQPEDGVEMDTRSPHDEDPQAVTYAKVKHSRPRREMASPPSPLSGEFLDTKDRQAEEDRQMDTEAAASEAPQDVTYAQLHSFTLRQKATEPPPSQEGASPAEPSVYATLAIH

SEQ ID NO: 84 - protein, 448 aa, Homo sapiens
MIPTFTALLCLGLSLGPRTHMQAGPLPKPTLWAEPGSVISWGNSVTIWCQGTLEAREYRLDKEESPAPWDRQNPLEPKNKARFSIPSMTEDYAGRYRCYYRSPVGWSQPSDPLELVMTGAYSKPTLSALPSPLVTSGKSVTLLCQSRSPMDTFLLIKERAAHPLLHLRSEHGAQQHQAEFPMSPVTSVHGGTYRCFSSHGFSHYLLSHPSDPLELIVSGSLEDPRPSPTRSVSTAAGPEDQPLMPTGSVPHSGLRRHWEVLIGVLVVSILLLSLLLFLLLQHWRQGKHRTLAQRQADFQRPPGAAEPEPKDGGLQRRSSPAADVQGENFCAAVKNTQPEDGVEMDTRQSPHDEDPQAVTYAKVKHSRPRREMASPPSPLSGEFLDTKDRQAEEDRQMDTEAAASEAPQDVTYAQLHSFTLRQKATEPPPSQEGASPAEPSVYATLAIH

SEQ ID NO: 85 - protein, 259 aa, Homo sapiens
MIPTFTALLCLGLSLGPRTHMQAGPLPKPTLWAEPGSVISWGNSVTIWCQGTLEAREYRLDKEESPAPWDRQNPLEPKNKARFSIPSMTEDYAGRYRCYYRSPVGWSQPSDPLELVMTGAYSKPTLSALPSPLVTSGKSVTLLCQSRSPMDTFLLIKERAAHPLLHLRSEHGAQQHQAEFPMSPVTSVHGGTYRCFSSHGFSHYLLSHPSDPLELIVSGSLEDPRPSPTRSVSTAAGPEDQPLMPTGSVPHSGLRRHWE

SEQ ID NO: 86 - protein, 491 aa, Artificial Sequence
  Description of Artificial Sequence: Synthetic Protein Sequence
MIPTFTALLCLGLSLGPRTHMQAGPLPKPTLWAEPGSVISWGNSVTIWCQGTLEAREYRLDKEESPAPWDRQNPLEPKNKARFSIPSMTEDYAGRYRCYYRSPVGWSQPSDPLELVMTGAYSKPTLSALPSPLVTSGKSVTLLCQSRSPMDTFLLIKERAAHPLLHLRSEHGAQQHQAEFPMSPVTSVHGGTYRCFSSHGFSHYLLSHPSDPLELIVSGSLEDPRPSPTRSVSTAAGPEDQPLMPTGSVPHSGLRRHWEEPKSCDKTHTCPPCPAPELLGGPSVFLFPPKPKDTLMISRTPEVTCVVVDVSHEDPEVKFNWYVDGVEVHNAKTKPREEQYNSTYRVVSVLTVLHQDWLNGKEYKCKVSNKALPAPIEKTISKAKGQPREPQVYTLPPSRDELTKNQVSLTCLVKGFYPSDIAVEWESNGQPENNYKTTPPVLDSDGSFFLYSKLTVDKSRWQQGNVFSCSVMHEALHNHYTQKSLSLSPGK

SEQ ID NO: 87 - protein, 503 aa, Artificial  Sequence
  Description of Artificial Sequence: Synthetic Protein Sequence
MIPTFTALLCLGLSLGPRTHMQAGPLPKPTLWAEPGSVISWGNSVTIWCQGTLEAREYRLDKEESPAPWDRQNPLEPKNKARFSIPSMTEDYAGRYRCYYRSPVGWSQPSDPLELVMTGAYSKPTLSALPSPLVTSGKSVTLLCQSRSPMDTFLLIKERAAHPLLHLRSEHGAQQHQAEFPMSPVTSVHGGTYRCFSSHGFSHYLLSHPSDPLELIVSGSLEDPRPSPTRSVSTAAGPEDQPLMPTGSVPHSGLRRHWEGGGGSGGGGSGGGGSAESKYGPPCPPCPAPEAAGGPSVFLFPPKPKDTLMISRTPEVTCVVVDVSQEDPEVQFNWYVDGVEVHNAKTKPREEQFNSTYRVVSVLTVLHQDWLNGKEYKCKVSNKGLPSSIEKTISKAKGQPREPQVYTLPPSQEEMTKNQVSLTCLVKGFYPSDIAVEWESNGQPENNYKTTPPVLDSDGSFFLYSRLTVDKSRWQEGNVFSCSVMHEALHNHYTQKSLSLSLG

SEQ ID NO: 88 - protein, 211 aa, Homo sapiens
MVAHNQVAADNAVSTAAEPRRRPEPSSSSSSSPAAPARPRPCPAVPAPAPGDTHFRTFRSHADYRRITRASALLDACGFYWGPLSVHGAHERLRAEPVGTFLVRDSRQRNCFFALSVKMASGPTSIRVHFQAGRFHLDGSRESFDCLFELLEHYVAAPRRMLGAPLRQRRVRPLQELCRQRIVATVGRENLARIPLNPVLRDYLSSFPFQI

SEQ ID NO: 89 - protein, 19 aa, Artificial Sequence
  Description of Artificial Sequence: TCR Inhibitory Peptide
MYKTPTLKYFGGFNFSQIL

SEQ ID NO: 90 - protein, 11 aa, Artificial Sequence
  Description of Artificial Sequence: TCR Inhibitory Peptide
MYKTPTLKYFG

SEQ ID NO: 91 - protein, 11 aa, Artificial Sequence
  Description of Artificial Sequence: TCR Inhibitory Peptide
MYKIPTLKYFG

SEQ ID NO: 92 - protein, 11 aa, Artificial Sequence
  Description of Artificial Sequence: TCR Inhibitory Peptide
MYKILTLKYFG

SEQ ID NO: 93 - protein, 11 aa, Artificial Sequence
  Description of Artificial Sequence: TCR Inhibitory Peptide
GYKILTLKYFG

SEQ ID NO: 94 - protein, 11 aa, Artificial Sequence
  Description of Artificial Sequence: TCR Inhibitory Peptide
GYRTPTLKVFG

SEQ ID NO: 95 - protein, 11 aa, Artificial Sequence
  Description of Artificial Sequence: TCR Inhibitory Peptide
GFRIPLLKYFG

SEQ ID NO: 96 - protein, 22 aa, Artificial Sequence
  Description of Artificial Sequence: TCR Inhibitory Peptide
GFRIPLLKYFGGFRIPLLKYFG

SEQ ID NO: 97 - protein, 11 aa, Artificial Sequence
  Description of Artificial Sequence: TCR Inhibitory Peptide
GYRTPTLKVFG

SEQ ID NO: 98 - protein, 19 aa, Artificial Sequence
  Description of Artificial Sequence: TCR Inhibitory Peptide
GYRTPTLKVFGGFNFSQIL

SEQ ID NO: 99 - protein, 19 aa, Artificial Sequence
  Description of Artificial Sequence: TCR Inhibitory Peptide
GYKTPTLKYFGGFNFSQIL

SEQ ID NO: 100 - protein, 25 aa, Artificial Sequence
  Description of Artificial Sequence: TCR Inhibitory Peptide
KKKRGYKTPTLKYFGGFNFSQILKR

SEQ ID NO: 101 - protein, 50 aa, Artificial Sequence
  Description of Artificial Sequence: TCR Inhibitory Peptide
KKKRGYKTPTLKYFGGFNFSQILKRKKKRGYKTPTLKYFGGFNFSQILKR

SEQ ID NO: 102 - protein, 16 aa, Artificial Sequence
  Description of Artificial Sequence: TCR Inhibitory Peptide
KKRGYKTPTLKVFGKR

SEQ ID NO: 103 - protein, 32 aa, Artificial Sequence
  Description of Artificial Sequence: TCR Inhibitory Peptide
KKRGYKTPTLKVFGKRKKRGYKTPTLKVFGKR

SEQ ID NO: 104 - protein, 41 aa, Artificial Sequence
  Description of Artificial Sequence: TCR Inhibitory Peptide
AVPVAVWLVSALAMGAGVAGGITGSMSLASGKSLLHEVDKD

SEQ ID NO: 105 - protein, 14 aa, Artificial Sequence
  Description of Artificial Sequence: TCR Inhibitory Peptide
LASGKSLLHEVDKD

SEQ ID NO: 106 - protein, 18 aa, Artificial Sequence
  Description of Artificial Sequence: TCR Inhibitory Peptide
ATDGQLNHRVEKVEKKLT

SEQ ID NO: 107 - protein, 13 aa, Artificial Sequence
  Description of Artificial Sequence: TCR Inhibitory Peptide
LNHRVEKVEKKLT

SEQ ID NO: 108 - protein, 18 aa, Artificial Sequence
  Description of Artificial Sequence: TCR Inhibitory Peptide
ANERNIVKDLKRLENKIN

SEQ ID NO: 109 - protein, 13 aa, Artificial Sequence
  Description of Artificial Sequence: TCR Inhibitory Peptide
IVKDLKRLENKIN

SEQ ID NO: 110 - protein, 14 aa, Artificial Sequence
  Description of Artificial Sequence: TCR Inhibitory Peptide
LASGKSLLHVEKKD

SEQ ID NO: 111 - protein, 14 aa, Artificial Sequence
  Description of Artificial Sequence: TCR Inhibitory Peptide
LASGKRVEHEVDKD

SEQ ID NO: 112 - protein, 14 aa, Artificial Sequence
  Description of Artificial Sequence: TCR Inhibitory Peptide
LASGKDLKHVEKKD

SEQ ID NO: 113 - protein, 14 aa, Artificial Sequence
  Description of Artificial Sequence: TCR Inhibitory Peptide
LASGKSLLHLENKD

SEQ ID NO: 114 - protein, 18 aa, Artificial Sequence
  Description of Artificial Sequence: TCR Inhibitory Peptide
ATDGQLNHRVEKLENKLT

SEQ ID NO: 115 - protein, 18 aa, Artificial Sequence
  Description of Artificial Sequence: TCR Inhibitory Peptide
ANERNIVKRVERLENKIN

SEQ ID NO: 116 - protein, 28 aa, Artificial Sequence
  Description of Artificial Sequence: TCR Inhibitory Peptide
LASGKDLKHVEKKDLASGKDLKHVEKKD

SEQ ID NO: 117 - protein, 13 aa, Artificial Sequence
  Description of Artificial Sequence: TCR Inhibitory Peptide
LNHRVEKLENKLT

SEQ ID NO: 118 - protein, 18 aa, Artificial Sequence
  Description of Artificial Sequence: TCR Inhibitory Peptide
KKRLNHRVEKLENKLTKR

SEQ ID NO: 119 - protein, 15 aa, Artificial Sequence
  Description of Artificial Sequence: TCR Inhibitory Peptide
RNIVKRVEKVEKKLT

SEQ ID NO: 120 - protein, 30 aa, Artificial Sequence
  Description of Artificial Sequence: TCR Inhibitory Peptide
RNIVKRVEKVEKKLTRNIVKRVEKVEKKLT

SEQ ID NO: 121 - protein, 39 aa, Artificial Sequence
  Description of Artificial Sequence: TCR Inhibitory Peptide
GTFTWTLSDSEGKDTPGGYCLTRWMLIEAELKCFGNTAV

SEQ ID NO: 122 - protein, 15 aa, Artificial Sequence
  Description of Artificial Sequence: TCR Inhibitory Peptide
LTRWMLIEAELKCFG

SEQ ID NO: 123 - protein, 39 aa, Artificial Sequence
  Description of Artificial Sequence: TCR Inhibitory Peptide
GTFTWTLSDSSGVENPGGYCLTKWMILAAELKCFGNTAV

SEQ ID NO: 124 - protein, 15 aa, Artificial Sequence
  Description of Artificial Sequence: TCR Inhibitory Peptide
LTKWMILAAELKCFG

SEQ ID NO: 125 - protein, 39 aa, Artificial Sequence
  Description of Artificial Sequence: TCR Inhibitory Peptide
GLFTWTLSDSEGNDMPGGYCLTRSMLIGLDLKCFGNTAI

SEQ ID NO: 126 - protein, 15 aa, Artificial Sequence
  Description of Artificial Sequence: TCR Inhibitory Peptide
LTRSMLIGLDLKCFG

SEQ ID NO: 127 - protein, 39 aa, Artificial Sequence
  Description of Artificial Sequence: TCR Inhibitory Peptide
AFFSWSLTDPLGNEAPGGYCLEKWMLVASELKCFGNTAI

SEQ ID NO: 128 - protein, 15 aa, Artificial Sequence
  Description of Artificial Sequence: TCR Inhibitory Peptide
LEKWMLVASELKCFG

SEQ ID NO: 129 - protein, 17 aa, Artificial Sequence
  Description of Artificial Sequence: TCR Inhibitory Peptide
LQNRRGLDLLFLKEGGL

SEQ ID NO: 130 - protein, 17 aa, Artificial Sequence
  Description of Artificial Sequence: TCR Inhibitory Peptide
ILNRKAIDFLLRRWGGT

SEQ ID NO: 131 - protein, 17 aa, Artificial Sequence
  Description of Artificial Sequence: TCR Inhibitory Peptide
ILNRKAIDFLLQRWGGT

SEQ ID NO: 132 - protein, 17 aa, Artificial Sequence
  Description of Artificial Sequence: TCR Inhibitory Peptide
LINRHAIDFLLTRWGGT

SEQ ID NO: 133 - protein, 17 aa, Artificial Sequence
  Description of Artificial Sequence: TCR Inhibitory Peptide
LQNRRGLDLLFLKEGGL

SEQ ID NO: 134 - protein, 33 aa, Artificial Sequence
  Description of Artificial Sequence: TCR Inhibitory Peptide
VINDTSFVECIPPPQSRPAWNLWNNRRKTFSFL

SEQ ID NO: 135 - protein, 15 aa, Artificial Sequence
  Description of Artificial Sequence: TCR Inhibitory Peptide
QSRPAWNLWNNRRKT

SEQ ID NO: 136 - protein, 22 aa, Artificial Sequence
  Description of Artificial Sequence: TCR Inhibitory Peptide
GYCLTRWMLIEAELKCFGNTAV

SEQ ID NO: 137 - protein, 44 aa, Artificial Sequence
  Description of Artificial Sequence: TCR Inhibitory Peptide
GYGLTRWMLIEAELKCFGNTAVGYGLTRWMLIEAELKCFGNTAV

SEQ ID NO: 138 - protein, 27 aa, Artificial Sequence
  Description of Artificial Sequence: TCR Inhibitory Peptide
KKRGYCLTRWMLIEAELKCFGNTAVKR

SEQ ID NO: 139 - protein, 16 aa, Artificial Sequence
  Description of Artificial Sequence: TCR Inhibitory Peptide
LQNRKAIDLWNNKEGG

SEQ ID NO: 140 - protein, 32 aa, Artificial Sequence
  Description of Artificial Sequence: TCR Inhibitory Peptide
LQNRKAIDLWNNKEGGLQNRKAIDLWNNKEGG

SEQ ID NO: 141 - protein, 16 aa, Artificial Sequence
  Description of Artificial Sequence: TCR Inhibitory Peptide
ILNRRGLDGLDLKEGG

SEQ ID NO: 142 - protein, 32 aa, Artificial Sequence
  Description of Artificial Sequence: TCR Inhibitory Peptide
ILNRRGLDGLDLKEGGILNRRGLDGLDLKEGG

SEQ ID NO: 143 - protein, 21 aa, Artificial Sequence
  Description of Artificial Sequence: TCR Inhibitory Peptide
KKRILNRRGLDGLDLKEGGKR

SEQ ID NO: 144 - protein, 17 aa, Artificial Sequence
  Description of Artificial Sequence: TCR Inhibitory Peptide
CLTKPAWNLLFLKRKTF

SEQ ID NO: 145 - protein, 16 aa, Artificial Sequence
  Description of Artificial Sequence: TCR Inhibitory Peptide
LQNRDLKRLLFLKRKT

SEQ ID NO: 146 - protein, 32 aa, Artificial Sequence
  Description of Artificial Sequence: TCR Inhibitory Peptide
LQNRDLKRLLFLKRKTLQNRDLKRLLFLKRKT

SEQ ID NO: 147 - protein, 20 aa, Artificial Sequence
  Description of Artificial Sequence: TCR Inhibitory Peptide
KKLQNRDLKRLLFLKRKTKR

SEQ ID NO: 148 - protein, 14 aa, Artificial Sequence
  Description of Artificial Sequence: TCR Inhibitory Peptide
GQLNKTPTLKEGGL

SEQ ID NO: 149 - protein, 17 aa, Artificial Sequence
  Description of Artificial Sequence: TCR Inhibitory Peptide
GYCLTRRGLKEVDKEGG

SEQ ID NO: 150 - protein, 34 aa, Artificial Sequence
  Description of Artificial Sequence: TCR Inhibitory Peptide
GYCLTRRGLKEVDKEGGGYCLTRRGLKEVDKEGG

SEQ ID NO: 151 - protein, 21 aa, Artificial Sequence
  Description of Artificial Sequence: TCR Inhibitory Peptide
KKGYCLTRRGLKEVDKEGGKR

SEQ ID NO: 152 - protein, 16 aa, Artificial Sequence
  Description of Artificial Sequence: TCR Inhibitory Peptide
IPPPQSRTPTLKVFGG

SEQ ID NO: 153 - protein, 32 aa, Artificial Sequence
  Description of Artificial Sequence: TCR Inhibitory Peptide
IPPPQSRTPTLKVFGGIPPPQSRTPTLKVFGG

SEQ ID NO: 154 - protein, 21 aa, Artificial Sequence
  Description of Artificial Sequence: TCR Inhibitory Peptide
KKRIPPPQSRTPTLKVFGGKR

SEQ ID NO: 155 - protein, 390 aa, Homo sapiens
MPPSGLRLLPLLLPLLWLLVLTPGRPAAGLSTCKTIDMELVKRKRIEAIRGQILSKLRLASPPSQGEVPPGPLPEAVLALYNSTRDRVAGESAEPEPEPEADYYAKEVTRVLMVETHNEIYDKFKQSTHSIYMFFNTSELREAVPEPVLLSRAELRLLRLKLKVEQHVELYQKYSNNSWRYLSNRLLAPSDSPEWLSFDVTGVVRQWLSRGGEIEGFRLSAHCSCDSRDNTLQVDINGFTTGRRGDLATIHGMNRPFLLLMATPLERAQHLQSSRHRRALDTNYCFSSTEKNCCVRQLYIDFRKDLGWKWIHEPKGYHANFCLGPCPYIWSLDTQYSKVLALYNQHNPGASAAPCCVPQALEPLPIVYYVGRKPKVEQLSNMIVRSCKCS

SEQ ID NO: 156 - protein, 112 aa, Homo sapiens
ALDTNYCFSSTEKNCCVRQLYIDFRKDLGWKWIHEPKGYHANFCLGPCPYIWSLDTQYSKVLALYNQHNPGASAAPCCVPQALEPLPIVYYVGRKPKVEQLSNMIVRSCKCS

SEQ ID NO: 157 - protein, 130 aa, Artificial Sequence
  Description of Artificial Sequence: Synthetic Protein Sequence
MKWVTFISLLFLFSSAYSALDTNYCFSSTEKNCCVRQLYIDFRKDLGWKWIHEPKGYHANFCLGPCPYIWSLDTQYSKVLALYNQHNPGASAAPCCVPQALEPLPIVYYVGRKPKVEQLSNMIVRSCKCS

SEQ ID NO: 158 - protein, 390 aa, Artificial Sequence
  Description of Artificial Sequence: Synthetic Protein Sequence
MPPSGLRLLLLLLPLLWLLVLTPGRPAAGLSTSKTIDMELVKRKRIEAIRGQILSSLRLASPPSQGEVPPGPLPEAVLALYNSTRDRVAGESAEPEPEPEADRRAKEVTRVLMVETHNEIYDKFKQSTHSIYMFFNTSELREAVPEPVLLSRAELRLLRLKLKVEQHVELYQKYSNNSWRYLSNRLLAPSDSPEWLSFDVTGVVRQWLSRGGEIEGFRLSAHCSCDSRDNTLQVDINGFTTGRRGDLATIHGMNRPFLLLMATPLERAQHLQSSRHRRALDTNYCFSSTEKNCCVRQLYIDFRKDLGWKWIHEPKGYHANFCLGPCPYIWSLDTQYSKVLALYNQHNPGASAAPCCVPQALEPLPIVYYVGRKPKVEQLSNMIVRSCKCS

SEQ ID NO: 159 - protein, 20 aa, Homo sapiens
LQSSGLYSLSSVVTVPSSSL

SEQ ID NO: 160 - protein, 26 aa, Homo sapiens
PAVLQSSGLYSLSSVVTVPSSSLGTQ

SEQ ID NO: 161 - protein, 15 aa, Homo sapiens
YNSTYRVVSVLTVLH

SEQ ID NO: 162 - protein, 21 aa, Homo sapiens
EEQYNSTYRVVSVLTVLHQDW

SEQ ID NO: 163 - protein, 15 aa, Homo sapiens
PGLVRPSQTLSLTCT

SEQ ID NO: 164 - protein, 15 aa, Homo sapiens
WSWVRQPPGRGLEWI

SEQ ID NO: 165 - protein, 24 aa, Homo sapiens
LNNFYPREAKVQWKVDNALQSGNS

SEQ ID NO: 166 - protein, 21 aa, Homo sapiens
VDTSKNQFSLRLSSVTAADTA

SEQ ID NO: 167 - protein, 14 aa, Homo sapiens
FQHWGQGTLVTVSS

SEQ ID NO: 168 - protein, 14 aa, Homo sapiens
KVYACEVTHQGLSS

SEQ ID NO: 169 - protein, 15 aa, Homo sapiens
HPDYSVYLLLRLAKT

SEQ ID NO: 170 - protein, 14 aa, Homo sapiens
LLLRLAKTYETTLE

SEQ ID NO: 171 - protein, 25 aa, Homo sapiens
LGEYKFQNALLVRYTKKVPQVSTPT

SEQ ID NO: 172 - DNA, 3343 bp, Homo sapiens
ggcgcaacgctgagcagctggcgcgtcccgcgcggccccagttctgcgcagcttcccgaggctccgcaccagccgcgcttctgtccgcctgcagggcattccagaaagatgaggatatttgctgtctttatattcatgacctactggcatttgctgaacgccccatacaacaaaatcaaccaaagaattttggttgtggatccagtcacctctgaacatgaactgacatgtcaggctgagggctaccccaaggccgaagtcatctggacaagcagtgaccatcaagtcctgagtggtaagaccaccaccaccaattccaagagagaggagaagcttttcaatgtgaccagcacactgagaatcaacacaacaactaatgagattttctactgcacttttaggagattagatcctgaggaaaaccatacagctgaattggtcatcccagaactacctctggcacatcctccaaatgaaaggactcacttggtaattctgggagccatcttattatgccttggtgtagcactgacattcatcttccgtttaagaaaagggagaatgatggatgtgaaaaaatgtggcatccaagatacaaactcaaagaagcaaagtgatacacatttggaggagacgtaatccagcattggaacttctgatcttcaagcagggattctcaacctgtggtttaggggttcatcggggctgagcgtgacaagaggaaggaatgggcccgtgggatgcaggcaatgtgggacttaaaaggcccaagcactgaaaatggaacctggcgaaagcagaggaggagaatgaagaaagatggagtcaaacagggagcctggagggagaccttgatactttcaaatgcctgaggggctcatcgacgcctgtgacagggagaaaggatacttctgaacaaggagcctccaagcaaatcatccattgctcatcctaggaagacgggttgagaatccctaatttgagggtcagttcctgcagaagtgccctttgcctccactcaatgcctcaatttgttttctgcatgactgagagtctcagtgttggaacgggacagtatttatgtatgagtttttcctatttattttgagtctgtgaggtcttcttgtcatgtgagtgtggttgtgaatgatttcttttgaagatatattgtagtagatgttacaattttgtcgccaaactaaacttgctgcttaatgatttgctcacatctagtaaaacatggagtatttgtaaggtgcttggtctcctctataactacaagtatacattggaagcataaagatcaaaccgttggttgcataggatgtcacctttatttaacccattaatactctggttgacctaatcttattctcagacctcaagtgtctgtgcagtatctgttccatttaaatatcagctttacaattatgtggtagcctacacacataatctcatttcatcgctgtaaccaccctgttgtgataaccactattattttacccatcgtacagctgaggaagcaaacagattaagtaacttgcccaaaccagtaaatagcagacctcagactgccacccactgtccttttataatacaatttacagctatattttactttaagcaattcttttattcaaaaaccatttattaagtgcccttgcaatatcaatcgctgtgccaggcattgaatctacagatgtgagcaagacaaagtacctgtcctcaaggagctcatagtataatgaggagattaacaagaaaatgtattattacaatttagtccagtgtcatagcataaggatgatgcgaggggaaaacccgagcagtgttgccaagaggaggaaataggccaatgtggtctgggacggttggatatacttaaacatcttaataatcagagtaattttcatttacaaagagaggtcggtacttaaaataaccctgaaaaataacactggaattccttttctagcattatatttattcctgatttgcctttgccatataatctaatgcttgtttatatagtgtctggtattgtttaacagttctgtcttttctatttaaatgccactaaattttaaattcatacctttccatgattcaaaattcaaaagatcccatgggagatggttggaaaatctccacttcatcctccaagccattcaagtttcctttccagaagcaactgctactgcctttcattcatatgttcttctaaagatagtctacatttggaaatgtatgttaaaagcacgtatttttaaaatttttttcctaaatagtaacacattgtatgtctgctgtgtactttgctatttttatttattttagtgtttcttatatagcagatggaatgaatttgaagttcccagggctgaggatccatgccttctttgtttctaagttatctttcccatagcttttcattatctttcatatgatccagtatatgttaaatatgtcctacatatacatttagacaaccaccatttgttaagtatttgctctaggacagagtttggatttgtttatgtttgctcaaaaggagacccatgggctctccagggtgcactgagtcaatctagtcctaaaaagcaatcttattattaactctgtatgacagaatcatgtctggaacttttgttttctgctttctgtcaagtataaacttcactttgatgctgtacttgcaaaatcacattttctttctggaaattccggcagtgtaccttgactgctagctaccctgtgccagaaaagcctcattcgttgtgcttgaacccttgaatgccaccagctgtcatcactacacagccctcctaagaggcttcctggaggtttcgagattcagatgccctgggagatcccagagtttcctttccctcttggccatattctggtgtcaatgacaaggagtaccttggctttgccacatgtcaaggctgaagaaacagtgtctccaacagagctccttgtgttatctgtttgtacatgtgcatttgtacagtaattggtgtgacagtgttctttgtgtgaattacaggcaagaattgtggctgagcaaggcacatagtctactcagtctattcctaagtcctaactcctccttgtggtgttggatttgtaaggcactttatcccttttgtctcatgtttcatcgtaaatggcataggcagagatgatacctaattctgcatttgattgtcactttttgtacctgcattaatttaataaaatattcttatttattttgttacttggtacaccagcatgtccattttcttgtttattttgtgtttaataaaatgttcagtttaacatcccagtggagaaagtt

SEQ ID NO: 173 - DNA, 3644 bp, Homo sapiens
gcgtcccgcgcggccccagttctgcgcagcttcccgaggctccgcaccagccgcgcttctgtccgcctgcagggcattccagaaagatgaggatatttgctgtctttatattcatgacctactggcatttgctgaacgcatttactgtcacggttcccaaggacctatatgtggtagagtatggtagcaatatgacaattgaatgcaaattcccagtagaaaaacaattagacctggctgcactaattgtctattgggaaatggaggataagaacattattcaatttgtgcatggagaggaagacctgaaggttcagcatagtagctacagacagagggcccggctgttgaaggaccagctctccctgggaaatgctgcacttcagatcacagatgtgaaattgcaggatgcaggggtgtaccgctgcatgatcagctatggtggtgccgactacaagcgaattactgtgaaagtcaatgccccatacaacaaaatcaaccaaagaattttggttgtggatccagtcacctctgaacatgaactgacatgtcaggctgagggctaccccaaggccgaagtcatctggacaagcagtgaccatcaagtcctgagtggtaagaccaccaccaccaattccaagagagaggagaagcttttcaatgtgaccagcacactgagaatcaacacaacaactaatgagattttctactgcacttttaggagattagatcctgaggaaaaccatacagctgaattggtcatcccagaactacctctggcacatcctccaaatgaaaggactcacttggtaattctgggagccatcttattatgccttggtgtagcactgacattcatcttccgtttaagaaaagggagaatgatggatgtgaaaaaatgtggcatccaagatacaaactcaaagaagcaaagtgatacacatttggaggagacgtaatccagcattggaacttctgatcttcaagcagggattctcaacctgtggtttaggggttcatcggggctgagcgtgacaagaggaaggaatgggcccgtgggatgcaggcaatgtgggacttaaaaggcccaagcactgaaaatggaacctggcgaaagcagaggaggagaatgaagaaagatggagtcaaacagggagcctggagggagaccttgatactttcaaatgcctgaggggctcatcgacgcctgtgacagggagaaaggatacttctgaacaaggagcctccaagcaaatcatccattgctcatcctaggaagacgggttgagaatccctaatttgagggtcagttcctgcagaagtgccctttgcctccactcaatgcctcaatttgttttctgcatgactgagagtctcagtgttggaacgggacagtatttatgtatgagtttttcctatttattttgagtctgtgaggtcttcttgtcatgtgagtgtggttgtgaatgatttcttttgaagatatattgtagtagatgttacaattttgtcgccaaactaaacttgctgcttaatgatttgctcacatctagtaaaacatggagtatttgtaaggtgcttggtctcctctataactacaagtatacattggaagcataaagatcaaaccgttggttgcataggatgtcacctttatttaacccattaatactctggttgacctaatcttattctcagacctcaagtgtctgtgcagtatctgttccatttaaatatcagctttacaattatgtggtagcctacacacataatctcatttcatcgctgtaaccaccctgttgtgataaccactattattttacccatcgtacagctgaggaagcaaacagattaagtaacttgcccaaaccagtaaatagcagacctcagactgccacccactgtccttttataatacaatttacagctatattttactttaagcaattcttttattcaaaaaccatttattaagtgcccttgcaatatcaatcgctgtgccaggcattgaatctacagatgtgagcaagacaaagtacctgtcctcaaggagctcatagtataatgaggagattaacaagaaaatgtattattacaatttagtccagtgtcatagcataaggatgatgcgaggggaaaacccgagcagtgttgccaagaggaggaaataggccaatgtggtctgggacggttggatatacttaaacatcttaataatcagagtaattttcatttacaaagagaggtcggtacttaaaataaccctgaaaaataacactggaattccttttctagcattatatttattcctgatttgcctttgccatataatctaatgcttgtttatatagtgtctggtattgtttaacagttctgtcttttctatttaaatgccactaaattttaaattcatacctttccatgattcaaaattcaaaagatcccatgggagatggttggaaaatctccacttcatcctccaagccattcaagtttcctttccagaagcaactgctactgcctttcattcatatgttcttctaaagatagtctacatttggaaatgtatgttaaaagcacgtatttttaaaatttttttcctaaatagtaacacattgtatgtctgctgtgtactttgctatttttatttattttagtgtttcttatatagcagatggaatgaatttgaagttcccagggctgaggatccatgccttctttgtttctaagttatctttcccatagcttttcattatctttcatatgatccagtatatgttaaatatgtcctacatatacatttagacaaccaccatttgttaagtatttgctctaggacagagtttggatttgtttatgtttgctcaaaaggagacccatgggctctccagggtgcactgagtcaatctagtcctaaaaagcaatcttattattaactctgtatgacagaatcatgtctggaacttttgttttctgctttctgtcaagtataaacttcactttgatgctgtacttgcaaaatcacattttctttctggaaattccggcagtgtaccttgactgctagctaccctgtgccagaaaagcctcattcgttgtgcttgaacccttgaatgccaccagctgtcatcactacacagccctcctaagaggcttcctggaggtttcgagattcagatgccctgggagatcccagagtttcctttccctcttggccatattctggtgtcaatgacaaggagtaccttggctttgccacatgtcaaggctgaagaaacagtgtctccaacagagctccttgtgttatctgtttgtacatgtgcatttgtacagtaattggtgtgacagtgttctttgtgtgaattacaggcaagaattgtggctgagcaaggcacatagtctactcagtctattcctaagtcctaactcctccttgtggtgttggatttgtaaggcactttatcccttttgtctcatgtttcatcgtaaatggcataggcagagatgatacctaattctgcatttgattgtcactttttgtacctgcattaatttaataaaatattcttatttattttgttacttggtacaccagcatgtccattttcttgtttattttgtgtttaataaaatgttcagtttaa

SEQ ID NO: 174 - DNA, 1623 bp, Homo sapiens
tggtcctgccgcctggtctcacctcgctatggttcgtctgcctctgcagtgcgtcctctggggctgcttgctgaccgctgtccatccagaaccacccactgcatgcagagaaaaacagtacctaataaacagtcagtgctgttctttgtgccagccaggacagaaactggtgagtgactgcacagagttcactgaaacggaatgccttccttgcggtgaaagcgaattcctagacacctggaacagagagacacactgccaccagcacaaatactgcgaccccaacctagggcttcgggtccagcagaagggcacctcagaaacagacaccatctgcacctgtgaagaaggctggcactgtacgagtgaggcctgtgagagctgtgtcctgcaccgctcatgctcgcccggctttggggtcaagcagattgctacaggggtttctgataccatctgcgagccctgcccagtcggcttcttctccaatgtgtcatctgctttcgaaaaatgtcacccttggacaaggtccccaggatcggctgagagccctggtggtgatccccatcatcttcgggatcctgtttgccatcctcttggtgctggtctttatcaaaaaggtggccaagaagccaaccaataaggccccccaccccaagcaggaaccccaggagatcaattttcccgacgatcttcctggctccaacactgctgctccagtgcaggagactttacatggatgccaaccggtcacccaggaggatggcaaagagagtcgcatctcagtgcaggagagacagtgaggctgcacccacccaggagtgtggccacgtgggcaaacaggcagttggccagagagcctggtgctgctgctgctgtggcgtgagggtgaggggctggcactgactgggcatagctccccgcttctgcctgcacccctgcagtttgagacaggagacctggcactggatgcagaaacagttcaccttgaagaacctctcacttcaccctggagcccatccagtctcccaacttgtattaaagacagaggcagaagtttggtggtggtggtgttggggtatggtttagtaatatccaccagaccttccgatccagcagtttggtgcccagagaggcatcatggtggcttccctgcgcccaggaagccatatacacagatgcccattgcagcattgtttgtgatagtgaacaactggaagctgcttaactgtccatcagcaggagactggctaaataaaattagaatatatttatacaacagaatctcaaaaacactgttgagtaaggaaaaaaaggcatgctgctgaatgatgggtatggaactttttaaaaaagtacatgcttttatgtatgtatattgcctatggatatatgtataaatacaatatgcatcatatattgatataacaagggttctggaagggtacacagaaaacccacagctcgaagagtggtgacgtctggggtggggaagaagggtctgggggagggttggttaaagggagatttggctttcccataatgcttcatcatttttcccaaaaggagagtgaattcacataatgcttatgtaattaaaaaatcatcaaacatgtaaaaagaaaa

SEQ ID NO: 175 - DNA, 5815 bp, Homo sapiens
cctcgctatggttcgtctgcctctgcagtgcgtcctctggggctgcttgctgaccgctgtccatccagaaccacccactgcatgcagagaaaaacagtacctaataaacagtcagtgctgttctttgtgccagccaggacagaaactggtgagtgactgcacagagttcactgaaacggaatgccttccttgcggtgaaagcgaattcctagacacctggaacagagagacacactgccaccagcacaaatactgcgaccccaacctagggcttcgggtccagcagaagggcacctcagaaacagacaccatctgcacctgtgaagaaggctggcactgtacgagtgaggcctgtgagagctgtgtcctgcaccgctcatgctcgcccggctttggggtcaagcagattggtaagtggctcatctgggaatcagttttggagggggacagaggagcttagggcccaaggtgaggggctgggcagtgggcacttagccccagaggcagaggaagcagaggctccaacctatgtcggtatccccactggagtgagctgcagacgggaccttgttcattctgccttctgccatggggatctgcctttgaagggcaatgggagaagtcctcctggggactgcagctgtcgggggcagtaccacatcgggggaagagtgctcaaggcaggagctcttcccgtcctgcctggccactggctgccttgtgagccggacaggtggtccactgtgatggttaatgtccccctccccacccactcccagctacaggggtttctgataccatctgcgagccctgcccagtcggcttcttctccaatgtgtcatctgctttcgaaaaatgtcacccttggacaaggtataagcactcatcccttgtgtttcctgctctaagagtggcatggagctgcctccattctctccagccacctgtcctgtccctgctcccagaggtccacacacactcatgtacttgtgaagcatctgcagagtggcctcatggccaaccagacaggcacatttccacattttttttgcctgctgtctctttgaggtaatagacactgttgatctctcgcttcatgagagcctcctatcttgggggtattgggacacttattttagctttccttctgcccctcctgcttctcctcagttttcctcgtcttgctttcaccttacctggctttctagggctttctgggctctgggtgctcaccctgagggcctccctctcttacctccaactccaaacccacaccaggtcctgccactggctgtctacgtgttttgggaacttactgtctccactgttgtcactttagtttgggcctcatcactgtggtctgggtgatgccttttctgcctcctggcctccctgcctctgtctctcccctcctgctggttctgtctccatcctcttgccaacatgagcgttcgacagtttctttcaaatcatgacactctcctatttgagatgcttcctgtctctctgttggaactaagactccttagcatggcacccaaccttcctgttgcatttcctgctctctttcctgcatcgcatagcttcatgctacttgcaatcctctgaacacactgttcattctcttccatcaaactcatctgcctggaataccttaaacatgggccccaggccaggcgcggtggctcttgcctgtaatctcagcactttggatgccaaggcgggtggatcacttgaggtcaggagttcaagaccagccagcacaacatggtaaaaacccatctctactaaaaataccaaaaaattagctgggtgtggtggtgggcgcctgtaatcccagctcctcgggaggctgaggcaggagaatcacttgaacccggaaggtggagtttgcagtgagccaagatagcgccactgcactccagcctgggcaacagagcgacattctgtctcaaaaaaaaaaaaaaaaaaaaaaaagactaaagtacatggtttcttcaaagcttctctctctttctcccaccttagatgatttttcctttgcaatgtcctgtgtccattccgccccactcctcctggggccacctggaccaggtcttcatcatctcatatctatatgtttgctgtgtctcctggctggccactcttctgtaatttctcctcctctgagctctctgggcagctgaatcttctcactagtgaagtcgcctggttggatgctgatgagactgaccagctgaatccagttgaaaacttcacacttggcagtgatctggttctaaagacacaattttccatagtttcctaacaccatcctgcatgccacctgccttatttccccacatcacatcgtcccacttagcgggactgcactgctgatccaaattttacatcctttagggcccactcaggtcatatgtcctcagggaagtctttctggaagaaccttaaaccagaggttctcaacagggggcagttttgctccctgtggaacgtttgccaatgtctggacacatttcattcgtcacaaacggagagggggatgctacagggatctggcggatagaggccagggatgctgctgaacatctgcaatgcataggacagcccacccccacccccacacccccagtaaataatgatccagcccaagtgtcactggtgctgacgttgagtaaccctatcttaagctgaactcatcatctctccattccagccttggtggattctgtctcctctgaaccattcccatctcactttagcctacctagatcacaaagcttggcactcattatagactcccctatttattactccttcaagatgtgcaagaatcttttctctgcacttttaagttctgtaagaagagtctgtgtcgttcctataataaccagcataggacgttgcacgtgttgtgtgctcagtgaacctggatttgttgattgttgactgactcactctagagttggaaatcttatgcttggggaaacttaatatctctttctttctctgtgtgtgtgcatttgtgcacgtgtctgtgcatagctgtgagaccaaagacctggttgtgcaacaggcaggcacaaacaagactgatgttgtctgtggtgagtcctggacaatgggccctggagaaagcctaggaaggtgggaactgaagggggagatgaggcacacaggaacactggatgggaaaaaggggaggggaggcagtttgggggtgtggtatcacagctctgccacttatcttgggagtctgggcaaatcacttcccctctcttagcctcagtttcttcatctgtaaaatgggatgataacagcacttccttagtaggttttgattttagagtgagaaggttggcctacagtaaagatcagataatgtaaatcagtgaaaaaggtcaggggtaagaaaattacattctctttacctaacgctaaatgaccagttaatgggtgcagcacaccaacatggtacatgtatacatatgtaacaaacctgcacattatgcacatgtaccctaaagcttaaagtataataataataaaatttaaaaaaacgaaaaatacattctctttgctttttctcaaaatgtactttcctctttgtagggctgggactagaatgaggtgagcaaggcacttgccctcgggcgcaatatttaagaaggtgccataaaagtgtagtaatcaaggtaaattcattttgatgcaatatttttaaaaataaaaattaatgcaaagaaatccatgatgagcaagatagcaacattttaaataaagaacaggatccgaccctgtgtttgcatgaccctgcctcactcacctcaccctaatcctggccctggttccagtaaaaggaataggcagccagcctgcaggccgtagtttgctgacttggtgtccgcctgatgattttcaaaatatggcattaaaagaatgtttaccttgatgactgagtgttttggacatccttttcaattttgtcctgaaacaatttcatcccttgcctcacgctagtctccgccctgccttttggtctttcttttattttcccactttgaaaaaaaaattcggcatgagaaatactttacctttcccctccactcttctataccaaaagcaacatgcagacatgaatcatgctagacctcggcattgggcagagagcagggagtggcggggagcatggtgagcaggtggtgacagccactgccaccactcgcttctagatggttcccaggtggggaggctgccaactggaacccagtcttcccagtttgtaagagaaatcagatgtctaggtttgaatatgtgatctcccagtttaaaaatgtcggcaaatatttccaaacgttaagaaaatgttctggctcctttaaagacatctgccagccacatttccccaaggaccgcggtttgaaccttctgatgtagatgagctctgacattggaagattctggagtctgacaagtcacagcaggttgagggtagggagaaactgcaggtgaggggtgcatgctgaagtcctgatttctccaggtccccaggatcggctgagagccctggtggtgatccccatcatcttcgggatcctgtttgccatcctcttggtgctggtctttatcaaaaaggtggccaagaagccaaccaataaggtaggtcacccctgagaacccgggacagagttttgacaaactgggaagatggcctcacggttgcctatggggcagtaaaactgattcagagtctgtctctgcagccagtggggtggcagcagaattggggactgtcatccccacccaccatgctccttccatccagagctcaatcccccacagaactgcccctggcaccactggcagagcctaacactggctgttcttcactcctttcctggcattcaacgcgtggggagctgcatctttgggccttggggctgggtcaaatgggtgggagcaaatgtggcagccccttaagcccactggctcccactctggaagctcttcgtcgcccttggtgtggccagcagggggcaggaggcacccgaggaatcagcactgacccgccgtctgggaaaggggggagggcttggggaagggatccgcttcccagggaggggctcctcagaggcacagctgcccctgctgctgggggtgacctcacaccttgcctctccaggccccccaccccaagcaggaaccccaggagatcaattttcccgacgatcttcctggctccaacactgctgctccagtgcaggagactttacatggatgccaaccggtcacccaggaggatggcaaagagagtcgcatctcagtgcaggagagacagtgaggctgcacccacccaggagtgtggccacgtgggcaaacaggcagttggccagagagcctggtgctgctgctgctgtggcgtgagggtgaggggctggcactgactgggcatagctccccgcttctgcctgcacccctgcagtttgagacaggagacctggcactggatgcagaaacagttcaccttgaagaacctctcacttcaccctggagcccatccagtctcccaacttgtattaaagacagaggcagaagtttggtggtggtggtgttggggtatggtttagtaatatccaccagaccttccgatccagcagtttggtgcccagagaggcatcatggtggcttccctgcgcccaggaagccatatacacagatgcccattgcagcattgtttgtgatagtgaacaactggaagctgcttaactgtccatcagcaggagactggctaaataaaattagaatatatttatac

SEQ ID NO: 176 - DNA, 1729 bp, Homo sapiens
ggctggggcaggggagtcagcagaggcctcgctcgggcgcccagtggtcctgccgcctggtctcacctcgctatggttcgtctgcctctgcagtgcgtcctctggggctgcttgctgaccgctgtccatccagaaccacccactgcatgcagagaaaaacagtacctaataaacagtcagtgctgttctttgtgccagccaggacagaaactggtgagtgactgcacagagttcactgaaacggaatgccttccttgcggtgaaagcgaattcctagacacctggaacagagagacacactgccaccagcacaaatactgcgaccccaacctagggcttcgggtccagcagaagggcacctcagaaacagacaccatctgcacctgtgaagaaggctggcactgtacgagtgaggcctgtgagagctgtgtcctgcaccgctcatgctcgcccggctttggggtcaagcagattgctacaggggtttctgataccatctgcgagccctgcccagtcggcttcttctccaatgtgtcatctgctttcgaaaaatgtcacccttggacaagctgtgagaccaaagacctggttgtgcaacaggcaggcacaaacaagactgatgttgtctgtggtccccaggatcggctgagagccctggtggtgatccccatcatcttcgggatcctgtttgccatcctcttggtgctggtctttatcaaaaaggtggccaagaagccaaccaataaggccccccaccccaagcaggaaccccaggagatcaattttcccgacgatcttcctggctccaacactgctgctccagtgcaggagactttacatggatgccaaccggtcacccaggaggatggcaaagagagtcgcatctcagtgcaggagagacagtgaggctgcacccacccaggagtgtggccacgtgggcaaacaggcagttggccagagagcctggtgctgctgctgctgtggcgtgagggtgaggggctggcactgactgggcatagctccccgcttctgcctgcacccctgcagtttgagacaggagacctggcactggatgcagaaacagttcaccttgaagaacctctcacttcaccctggagcccatccagtctcccaacttgtattaaagacagaggcagaagtttggtggtggtggtgttggggtatggtttagtaatatccaccagaccttccgatccagcagtttggtgcccagagaggcatcatggtggcttccctgcgcccaggaagccatatacacagatgcccattgcagcattgtttgtgatagtgaacaactggaagctgcttaactgtccatcagcaggagactggctaaataaaattagaatatatttatacaacagaatctcaaaaacactgttgagtaaggaaaaaaaggcatgctgctgaatgatgggtatggaactttttaaaaaagtacatgcttttatgtatgtatattgcctatggatatatgtataaatacaatatgcatcatatattgatataacaagggttctggaagggtacacagaaaacccacagctcgaagagtggtgacgtctggggtggggaagaagggtctgggggagggttggttaaagggagatttggctttcccataatgcttcatcatttttcccaaaaggagagtgaattcacataatgcttatgtaattaaaaaatcatcaaacatgtaaaaagaaaa

SEQ ID NO: 177 - DNA, 1720 bp, Homo sapiens
accatttcaactttaacacagcatgatcgaaacatacaaccaaacttctccccgatctgcggccactggactgcccatcagcatgaaaatttttatgtatttacttactgtttttcttatcacccagatgattgggtcagcactttttgctgtgtatcttcatagaaggttggacaagatagaagatgaaaggaatcttcatgaagattttgtattcatgaaaacgatacagagatgcaacacaggagaaagatccttatccttactgaactgtgaggagattaaaagccagtttgaaggctttgtgaaggatataatgttaaacaaagaggagacgaagaaagaaaacagctttgaaatgcaaaaagtgttacagtgggctgaaaaaggatactacaccatgagcaacaacttggtaaccctggaaaatgggaaacagctgaccgttaaaagacaaggactctattatatctatgcccaagtcaccttctgttccaatcgggaagcttcgagtcaagctccatttatagccagcctctgcctaaagtcccccggtagattcgagagaatcttactcagagctgcaaatacccacagttccgccaaaccttgcgggcaacaatccattcacttgggaggagtatttgaattgcaaccaggtgcttcggtgtttgtcaatgtgactgatccaagccaagtgagccatggcactggcttcacgtcctttggcttactcaaactctgaacagtgtcaccttgcaggctgtggtggagctgacgctgggagtcttcataatacagcacagcggttaagcccaccccctgttaactgcctatttataaccctaggatcctccttatggagaactatttattatacactccaaggcatgtagaactgtaataagtgaattacaggtcacatgaaaccaaaacgggccctgctccataagagcttatatatctgaagcagcaaccccactgatgcagacatccagagagtcctatgaaaagacaaggccattatgcacaggttgaattctgagtaaacagcagataacttgccaagttcagttttgtttctttgcgtgcagtgtctttccatggataatgcatttgatttatcagtgaagatgcagaagggaaatggggagcctcagctcacattcagttatggttgactctgggttcctatggccttgttggagggggccaggctctagaacgtctaacacagtggagaaccgaaaccccccccccccccccgccaccctctcggacagttattcattctctttcaatctctctctctccatctctctctttcagtctctctctctcaacctctttcttccaatctctctttctcaatctctctgtttccctttgtcagtctcttccctcccccagtctctcttctcaatccccctttctaacacacacacacacacacacacacacacacacacacacacacacacacacacagagtcaggccgttgctagtcagttctcttctttccaccctgtccctatctctaccactatagatgagggtgaggagtagggagtgcagccctgagcctgcccactcctcattacgaaatgactgtatttaaaggaaatctattgtatctacctgcagtctccattgtttccagagtgaacttgtaattatcttgttatttattttttgaataataaagacctcttaacatta

SEQ ID NO: 178 - DNA, 1817 bp, Homo sapiens
catgctgcctctgccaccttctctgccagaagataccatttcaactttaacacagcatgatcgaaacatacaaccaaacttctccccgatctgcggccactggactgcccatcagcatgaaaatttttatgtatttacttactgtttttcttatcacccagatgattgggtcagcactttttgctgtgtatcttcatagaaggttggacaagatagaagatgaaaggaatcttcatgaagattttgtattcatgaaaacgatacagagatgcaacacaggagaaagatccttatccttactgaactgtgaggagattaaaagccagtttgaaggctttgtgaaggatataatgttaaacaaagaggagacgaagaaagaaaacagctttgaaatgcaaaaaggtgatcagaatcctcaaattgcggcacatgtcataagtgaggccagcagtaaaacaacatctgtgttacagtgggctgaaaaaggatactacaccatgagcaacaacttggtaaccctggaaaatgggaaacagctgaccgttaaaagacaaggactctattatatctatgcccaagtcaccttctgttccaatcgggaagcttcgagtcaagctccatttatagccagcctctgcctaaagtcccccggtagattcgagagaatcttactcagagctgcaaatacccacagttccgccaaaccttgcgggcaacaatccattcacttgggaggagtatttgaattgcaaccaggtgcttcggtgtttgtcaatgtgactgatccaagccaagtgagccatggcactggcttcacgtcctttggcttactcaaactctgaacagtgtcaccttgcaggctgtggtggagctgacgctgggagtcttcataatacagcacagcggttaagcccaccccctgttaactgcctatttataaccctaggatcctccttatggagaactatttattatacactccaaggcatgtagaactgtaataagtgaattacaggtcacatgaaaccaaaacgggccctgctccataagagcttatatatctgaagcagcaaccccactgatgcagacatccagagagtcctatgaaaagacaaggccattatgcacaggttgaattctgagtaaacagcagataacttgccaagttcagttttgtttctttgcgtgcagtgtctttccatggataatgcatttgatttatcagtgaagatgcagaagggaaatggggagcctcagctcacattcagttatggttgactctgggttcctatggccttgttggagggggccaggctctagaacgtctaacacagtggagaaccgaaaccccccccccccccccgccaccctctcggacagttattcattctctttcaatctctctctctccatctctctctttcagtctctctctctcaacctctttcttccaatctctctttctcaatctctctgtttccctttgtcagtctcttccctcccccagtctctcttctcaatccccctttctaacacacacacacacacacacacacacacacacacacacacacacacacacacagagtcaggccgttgctagtcagttctcttctttccaccctgtccctatctctaccactatagatgagggtgaggagtagggagtgcagccctgagcctgcccactcctcattacgaaatgactgtatttaaaggaaatctattgtatctacctgcagtctccattgtttccagagtgaacttgtaattatcttgttatttattttttgaataataaagacctcttaacatta

SEQ ID NO: 179 - DNA, 6886 bp, Homo sapiens
ccggccggaaggcttgcgccagctcaggatgaggacaggctgggcgacccctcgccgcccggcggggctcctcatgctgctcttctggttcttcgatctcgcggagccctctggccgcgcagctaatgaccccttcaccatcgtccatggaaatacgggcaagtgcatcaagccagtgtatggctggatagtagcagacgactgtgatgaaactgaggacaagttatggaagtgggtgtcccagcatcggctctttcatttgcactcccaaaagtgccttggcctcgatattaccaaatcggtaaatgagctgagaatgttcagctgtgactccagtgccatgctgtggtggaaatgtgagcaccactctctgtacggagctgcccggtaccggctggctctgaaggatggacatggcacagcaatctcaaatgcatctgatgtctggaagaaaggaggctcagaggaaagcctttgtgaccagccttatcatgagatctataccagagatgggaactcttatgggagaccttgtgaatttccattcttaattgatgggacctggcatcatgattgcattcttgatgaagatcatagtgggccatggtgtgccaccaccttaaattatgaatatgaccgaaagtggggcatctgcttaaagcctgaaaacggttgtgaagataattgggaaaagaacgagcagtttggaagttgctaccaatttaatactcagacggctctttcttggaaagaagcttatgtttcatgtcagaatcaaggagctgatttactgagcatcaacagtgctgctgaattaacttaccttaaagaaaaagaaggcattgctaagattttctggattggtttaaatcagctatactctgctagaggctgggaatggtcagaccacaaaccattaaactttctcaactgggatccagacaggcccagtgcacctactataggtggctccagctgtgcaagaatggatgctgagtctggtctgtggcagagcttttcctgtgaagctcaactgccctatgtctgcaggaaaccattaaataatacagtggagttaacagatgtctggacatactcagatacccgctgtgatgcaggctggctgccaaataatggattttgctatctgctggtaaatgaaagtaattcctgggataaggcacatgcgaaatgcaaagccttcagtagtgacctaatcagcattcattctctagcagatgtggaggtggttgtcacaaaactccataatgaggatatcaaagaagaagtgtggataggccttaagaacataaacataccaactttatttcagtggtcagatggtactgaagttactctaacatattgggatgagaatgagccaaatgttccctacaataagacgcccaactgtgtttcctacttaggagagctaggtcagtggaaagtccaatcatgtgaggagaaactaaaatatgtatgcaagagaaagggagaaaaactgaatgacgcaagttctgataagatgtgtcctccagatgagggctggaagagacatggagaaacctgttacaagatttatgaggatgaggtcccttttggaacaaactgcaatctgactatcactagcagatttgagcaagaatacctaaatgatttgatgaaaaagtatgataaatctctaagaaaatacttctggactggcctgagagatgtagattcttgtggagagtataactgggcaactgttggtggaagaaggcgggctgtaaccttttccaactggaattttcttgagccagcttccccgggcggctgcgtggctatgtctactggaaagtctgttggaaagtgggaggtgaaggactgcagaagcttcaaagcactttcaatttgcaagaaaatgagtggaccccttgggcctgaagaagcatcccctaagcctgatgacccctgtcctgaaggctggcagagtttccccgcaagtctttcttgttataaggtattccatgcagaaagaattgtaagaaagaggaactgggaagaagctgaacgattctgccaagcccttggagcacacctttctagcttcagccatgtggatgaaataaaggaatttcttcactttttaacggaccagttcagtggccagcattggctgtggattggtttgaataaaaggagcccagatttacaaggatcctggcaatggagtgatcgtacaccagtgtctactattatcatgccaaatgagtttcagcaggattatgacatcagagactgtgctgctgtcaaggtatttcataggccatggcgaagaggctggcatttctatgatgatagagaatttatttatttgaggccttttgcttgtgatacaaaacttgaatgggtgtgccaaattccaaaaggccgtactccaaaaacaccagactggtacaatccagaccgtgctggaattcatggacctccacttataattgaaggaagtgaatattggtttgttgctgatcttcacctaaactatgaagaagccgtcctgtactgtgccagcaatcacagctttcttgcaactataacatcttttgtgggactaaaagccatcaaaaacaaaatagcaaatatatctggtgatggacagaagtggtggataagaattagcgagtggccaatagatgatcattttacatactcacgatatccatggcaccgctttcctgtgacatttggagaggaatgcttgtacatgtctgccaagacttggcttatcgacttaggtaaaccaacagactgtagtaccaagttgcccttcatctgtgaaaaatataatgtttcttcgttagagaaatacagcccagattctgcagctaaagtgcaatgttctgagcaatggattccttttcagaataagtgttttctaaagatcaaacccgtgtctctcacattttctcaagcaagcgatacctgtcactcctatggtggcacccttccttcagtgttgagccagattgaacaagactttattacatccttgcttccggatatggaagctactttatggattggtttgcgctggactgcctatgaaaagataaacaaatggacagataacagagagctgacgtacagtaactttcacccattattggttagtgggaggctgagaataccagaaaatttttttgaggaagagtctcgctaccactgtgccctaatactcaacctccaaaaatcaccgtttactgggacgtggaattttacatcctgcagtgaacgccactttgtgtctctctgtcagaaatattcagaagttaaaagcagacagacgttgcagaatgcttcagaaactgtaaagtatctaaataatctgtacaaaataatcccaaagactctgacttggcacagtgctaaaagggagtgtctgaaaagtaacatgcagctggtgagcatcacggacccttaccagcaggcattcctcagtgtgcaggcgctccttcacaactcttccttatggatcggactcttcagtcaagatgatgaactcaactttggttggtcagatgggaaacgtcttcattttagtcgctgggctgaaactaatgggcaactcgaagactgtgtagtattagacactgatggattctggaaaacagttgattgcaatgacaatcaaccaggtgctatttgctactattcaggaaatgagactgaaaaagaggtcaaaccagttgacagtgttaaatgtccatctcctgttctaaatactccgtggataccatttcagaactgttgctacaatttcataataacaaagaataggcatatggcaacaacacaggatgaagttcatactaaatgccagaaactgaatccaaaatcacatattctgagtattcgagatgaaaaggagaataactttgttcttgagcaactgctgtacttcaattatatggcttcatgggtcatgttaggaataacttatagaaataagtctcttatgtggtttgataagaccccactgtcatatacacattggagagcaggaagaccaactataaaaaatgagaagtttttggctggtttaagtactgacggcttctgggatattcaaacctttaaagttattgaagaagcagtttattttcaccagcacagcattcttgcttgtaaaattgaaatggttgactacaaagaagaatataatactacactgccacagtttatgccatatgaagatggtatttacagtgttattcaaaaaaaggtaacatggtatgaagcattaaacatgtgttctcaaagtggaggtcacttggcaagcgttcacaaccaaaatggccagctctttctggaagatattgtaaaacgtgatggatttccactatgggttgggctctcaagtcatgatggaagtgaatcaagttttgaatggtctgatggtagtacatttgactatatcccatggaaaggccaaacatctcctggaaattgtgttctcttggatccaaaaggaacttggaaacatgaaaaatgcaactctgttaaggatggtgctatttgttataaacctacaaaatctaaaaagctgtcccgtcttacatattcatcaagatgtccagcagcaaaagagaatgggtcacggtggatccagtacaagggtcactgttacaagtctgatcaggcattgcacagtttttcagaggccaaaaaattgtgttcaaaacatgatcactctgcaactatcgtttccataaaagatgaagatgagaataaatttgtgagcagactgatgagggaaaataataacattaccatgagagtttggcttggattatctcaacattctgttgaccagtcttggagttggttagatggatcagaagtgacatttgtcaaatgggaaaataaaagtaagagtggtgttggaagatgtagcatgttgatagcttcaaatgaaacttggaaaaaagttgaatgtgaacatggttttggaagagttgtctgcaaagtgcctctgggccctgattacacagcaatagctatcatagttgccacactaagtatcttagttctcatgggcggactgatttggttcctcttccaaaggcaccgtttgcacctggcgggtttctcatcagttcgatatgcacaaggagtgaatgaagatgagattatgcttccttctttccatgactaaattcttctaaaagttttctaatttgcactaatgtgttatgagaaattagtcacttaaaatgtcccagtgtcagtatttactctgctccaaagtagaactcttaaatactttttcagttgtttagatcttaggcatgtgctggtatccacagttaattccctgctaaatgccatgtttatcaccctaattaatagaatggaggggactccaaagctggaactgaagtccaaattgtttgtacagtaatatgtttaatgttcattttctctgtatgaatgtgattggtaactaggatatgtatattttaatagaatttttaacaaaacttcttagaaaattaaaataggcatattactaggtgacatgtctactttttaatttttaagagcatccggccaaatgcaaaattagtacctcaaagtaaaaattgaactgtaaactctatcagcattgtttcaaaatagtcatttttagcactggggaaaaataaacaataagacatgcttactttttaatttttatttttttgagactgagtctctctctgttgcccaggctggagtacaatggcgtgatctcggctcactgcaaatctccgcctcccaggttcaagcgattctcctgcctcagcctcctgagtagctgggattacaggcaactgccaccatgcccggctaatttttgtatttttagtagagatggggtttcaccatgttggccaggctggtctcgaactcgtgaccgcaggtgatcctcccgcctcggcctcccaaagtgctgggattacaggcatgagccaccgcgcctggcctctgcttactttttatatagcaaaatgattcctcttggcaagatgtttcttatattattccaaagttatttcataccattattatgtaaatatgaagagtttttttctgtttataattgtttataaaacaatgacttttaaagatttagtgcttaacattttcccaagtgtgggaacattatttttagattgagtaggtaccttgtagcagtgtgctttgcattttctgatgtattacatgactgtttcttttgtaaagagaatcaactaggtatttaagactgataattttacaatttatatgcttcacatagcatgtcaacttttgactaagaattttgttttacttttttaacatgtgttaaacagagaaagggtccatgaaggaaagtgtatgagttgcatttgtaaaaatgagactttttcagtggaactctaaaccttgtgatgactactaacaaatgtaaaattatgagtgattaagaaaacattgctttgtggttatcactttaagttttgacacctagattatagtcttagtaatagcatccactggaaaaggtgaaaatgttttattcggcatttaacttacatttgtactttatttttgtataaaatccatagatttattttacatttagagtatttacactatgataaagttgtaaataattttctaagacagtttttatatagtctacagttgtcctgatttcttattgaatttgttagactagttctcttgtcctgtgatctgtgtacaattttagtcactaagactttcctccaagaactaagccaacttgatgtgaaaagcacagctgtatataatggtgatgtcataataaagttgttttatcttttaagtaaaagtaaaa

SEQ ID NO: 180 - DNA, 5454 bp, Homo sapiens
atgaggacaggctgggcgacccctcgccgcccggcggggctcctcatgctgctcttctggttcttcgatctcgcggagccctctggccgcgcagctaatgaccccttcaccatcgtccatggaaatacgggcaagtgcatcaagccagtgtatggctggatagtagcagacgactgtgatgaaactgaggacaagttatggaagtgggtgtcccagcatcggctctttcatttgcactcccaaaagtgccttggcctcgatattaccaaatcggtaaatgagctgagaatgttcagctgtgactccagtgccatgctgtggtggaaatgtgagcaccactctctgtacggagctgcccggtaccggctggctctgaaggatggacatggcacagcaatctcaaatgcatctgatgtctggaagaaaggaggctcagaggaaagcctttgtgaccagccttatcatgagatctataccagagatgggaactcttatgggagaccttgtgaatttccattcttaattgatgggacctggcatcatgattgcattcttgatgaagatcatagtgggccatggtgtgccaccaccttaaattatgaatatgaccgaaagtggggcatctgcttaaagcctgaaaacggttgtgaagataattgggaaaagaacgagcagtttggaagttgctaccaatttaatactcagacggctctttcttggaaagaagcttatgtttcatgtcagaatcaaggagctgatttactgagcatcaacagtgctgctgaattaacttaccttaaagaaaaagaaggcattgctaagattttctggattggtttaaatcagctatactctgctagaggctgggaatggtcagaccacaaaccattaaactttctcaactgggatccagacaggcccagtgcacctactataggtggctccagctgtgcaagaatggatgctgagtctggtctgtggcagagcttttcctgtgaagctcaactgccctatgtctgcaggaaaccattaaataatacagtggagttaacagatgtctggacatactcagatacccgctgtgatgcaggctggctgccaaataatggattttgctatctgctggtaaatgaaagtaattcctgggataaggcacatgcgaaatgcaaagccttcagtagtgacctaatcagcattcattctctagcagatgtggaggtggttgtcacaaaactccataatgaggatatcaaagaagaagtgtggataggccttaagaacataaacataccaactttatttcagtggtcagatggtactgaagttactctaacatattgggatgagaatgagccaaatgttccctacaataagacgcccaactgtgtttcctacttaggagagctaggtcagtggaaagtccaatcatgtgaggagaaactaaaatatgtatgcaagagaaagggagaaaaactgaatgacgcaagttctgataagatgtgtcctccagatgagggctggaagagacatggagaaacctgttacaagatttatgaggatgaggtcccttttggaacaaactgcaatctgactatcactagcagatttgagcaagaatacctaaatgatttgatgaaaaagtatgataaatctctaagaaaatacttctggactggcctgagagatgtagattcttgtggagagtataactgggcaactgttggtggaagaaggcgggctgtaaccttttccaactggaattttcttgagccagcttccccgggcggctgcgtggctatgtctactggaaagtctgttggaaagtgggaggtgaaggactgcagaagcttcaaagcactttcaatttgcaagaaaatgagtggaccccttgggcctgaagaagcatcccctaagcctgatgacccctgtcctgaaggctggcagagtttccccgcaagtctttcttgttataaggtattccatgcagaaagaattgtaagaaagaggaactgggaagaagctgaacgattctgccaagcccttggagcacacctttctagcttcagccatgtggatgaaataaaggaatttcttcactttttaacggaccagttcagtggccagcattggctgtggattggtttgaataaaaggagcccagatttacaaggatcctggcaatggagtgatcgtacaccagtgtctactattatcatgccaaatgagtttcagcaggattatgacatcagagactgtgctgctgtcaaggtatttcataggccatggcgaagaggctggcatttctatgatgatagagaatttatttatttgaggccttttgcttgtgatacaaaacttgaatgggtgtgccaaattccaaaaggccgtactccaaaaacaccagactggtacaatccagaccgtgctggaattcatggacctccacttataattgaaggaagtgaatattggtttgttgctgatcttcacctaaactatgaagaagccgtcctgtactgtgccagcaatcacagctttcttgcaactataacatcttttgtgggactaaaagccatcaaaaacaaaatagcaaatatatctggtgatggacagaagtggtggataagaattagcgagtggccaatagatgatcattttacatactcacgatatccatggcaccgctttcctgtgacatttggagaggaatgcttgtacatgtctgccaagacttggcttatcgacttaggtaaaccaacagactgtagtaccaagttgcccttcatctgtgaaaaatataatgtttcttcgttagagaaatacagcccagattctgcagctaaagtgcaatgttctgagcaatggattccttttcagaataagtgttttctaaagatcaaacccgtgtctctcacattttctcaagcaagcgatacctgtcactcctatggtggcacccttccttcagtgttgagccagattgaacaagactttattacatccttgcttccggatatggaagctactttatggattggtttgcgctggactgcctatgaaaagataaacaaatggacagataacagagagctgacgtacagtaactttcacccattattggttagtgggaggctgagaataccagaaaatttttttgaggaagagtctcgctaccactgtgccctaatactcaacctccaaaaatcaccgtttactgggacgtggaattttacatcctgcagtgaacgccactttgtgtctctctgtcagaaatattcagaagttaaaagcagacagacgttgcagaatgcttcagaaactgtaaagtatctaaataatctgtacaaaataatcccaaagactctgacttggcacagtgctaaaagggagtgtctgaaaagtaacatgcagctggtgagcatcacggacccttaccagcaggcattcctcagtgtgcaggcgctccttcacaactcttccttatggatcggactcttcagtcaagatgatgaactcaactttggttggtcagatgggaaacgtcttcattttagtcgctgggctgaaactaatgggcaactcgaagactgtgtagtattagacactgatggattctggaaaacagttgattgcaatgacaatcaaccaggtgctatttgctactattcaggaaatgagactgaaaaagaggtcaaaccagttgacagtgttaaatgtccatctcctgttctaaatactccgtggataccatttcagaactgttgctacaatttcataataacaaagaataggcatatggcaacaacacaggatgaagttcatactaaatgccagaaactgaatccaaaatcacatattctgagtattcgagatgaaaaggagaataactttgttcttgagcaactgctgtacttcaattatatggcttcatgggtcatgttaggaataacttatagaaataagtctcttatgtggtttgataagaccccactgtcatatacacattggagagcaggaagaccaactataaaaaatgagaagtttttggctggtttaagtactgacggcttctgggatattcaaacctttaaagttattgaagaagcagtttattttcaccagcacagcattcttgcttgtaaaattgaaatggttgactacaaagaagaatataatactacactgccacagtttatgccatatgaagatggtatttacagtgttattcaaaaaaaggtaacatggtatgaagcattaaacatgtgttctcaaagtggaggtcacttggcaagcgttcacaaccaaaatggccagctctttctggaagatattgtaaaacgtgatggatttccactatgggttgggctctcaagtcatgatggaagtgaatcaagttttgaatggtctgatggtagtacatttgactatatcccatggaaaggccaaacatctcctggaaattgtgttctcttggatccaaaaggaacttggaaacatgaaaaatgcaactctgttaaggatggtgctatttgttataaacctacaaaatctaaaaagctgtcccgtcttacatattcatcaagatgtccagcagcaaaagagaatgggtcacggtggatccagtacaagggtcactgttacaagtctgatcaggcattgcacagtttttcagaggccaaaaaattgtgttcaaaacatgatcactctgcaactatcgtttccataaaagatgaagatgagaataaatttgtgagcagactgatgagggaaaataataacattaccatgagagtttggcttggattatctcaacattctgttgactgtccttcatctacttggattcagttccaagacagttgttacatttttctccaagaagccatcaaagtagaaagcatagaggatgtcagaaatcagtgtactgaccatggagcggacatgataagcatacataatgaagaagaaaatgcttttatactggatactttgaaaaagcaatggaaaggcccagatgatatcctactaggcatgttttatgacacagatgatgcgagtttcaagtggtttgataattcaaatatgacatttgataagtggacagaccaagatgatgatgaggatttagttgacacctgtgcttttctgcacatcaagacaggtgaatggaaaaaaggaaattgtgaagtttcttctgtggaaggaacactatgcaaaacagctatcccatacaaaaggaaatatttatcagataaccacattttaatatcagcattggtgattgctagcacggtaattttgacagttttgggagcaatcatttggttcctgtacaaaaaacattctgattctcgtttcaccacagttttttcaaccgcaccccaatcaccttataatgaagactgtgttttggtagttggagaagaaaatgaatatcctgttcaatttgactaa

SEQ ID NO: 181 - DNA, 5622 bp, Homo sapiens
atgaggacaggctgggcgacccctcgccgcccggcggggctcctcatgctgctcttctggttcttcgatctcgcggagccctctggccgcgcagctaatgaccccttcaccatcgtccatggaaatacgggcaagtgcatcaagccagtgtatggctggatagtagcagacgactgtgatgaaactgaggacaagttatggaagtgggtgtcccagcatcggctctttcatttgcactcccaaaagtgccttggcctcgatattaccaaatcggtaaatgagctgagaatgttcagctgtgactccagtgccatgctgtggtggaaatgtgagcaccactctctgtacggagctgcccggtaccggctggctctgaaggatggacatggcacagcaatctcaaatgcatctgatgtctggaagaaaggaggctcagaggaaagcctttgtgaccagccttatcatgagatctataccagagatgggaactcttatgggagaccttgtgaatttccattcttaattgatgggacctggcatcatgattgcattcttgatgaagatcatagtgggccatggtgtgccaccaccttaaattatgaatatgaccgaaagtggggcatctgcttaaagcctgaaaacggttgtgaagataattgggaaaagaacgagcagtttggaagttgctaccaatttaatactcagacggctctttcttggaaagaagcttatgtttcatgtcagaatcaaggagctgatttactgagcatcaacagtgctgctgaattaacttaccttaaagaaaaagaaggcattgctaagattttctggattggtttaaatcagctatactctgctagaggctgggaatggtcagaccacaaaccattaaactttctcaactgggatccagacaggcccagtgcacctactataggtggctccagctgtgcaagaatggatgctgagtctggtctgtggcagagcttttcctgtgaagctcaactgccctatgtctgcaggaaaccattaaataatacagtggagttaacagatgtctggacatactcagatacccgctgtgatgcaggctggctgccaaataatggattttgctatctgctggtaaatgaaagtaattcctgggataaggcacatgcgaaatgcaaagccttcagtagtgacctaatcagcattcattctctagcagatgtggaggtggttgtcacaaaactccataatgaggatatcaaagaagaagtgtggataggccttaagaacataaacataccaactttatttcagtggtcagatggtactgaagttactctaacatattgggatgagaatgagccaaatgttccctacaataagacgcccaactgtgtttcctacttaggagagctaggtcagtggaaagtccaatcatgtgaggagaaactaaaatatgtatgcaagagaaagggagaaaaactgaatgacgcaagttctgataagatgtgtcctccagatgagggctggaagagacatggagaaacctgttacaagatttatgaggatgaggtcccttttggaacaaactgcaatctgactatcactagcagatttgagcaagaatacctaaatgatttgatgaaaaagtatgataaatctctaagaaaatacttctggactggcctgagagatgtagattcttgtggagagtataactgggcaactgttggtggaagaaggcgggctgtaaccttttccaactggaattttcttgagccagcttccccgggcggctgcgtggctatgtctactggaaagtctgttggaaagtgggaggtgaaggactgcagaagcttcaaagcactttcaatttgcaagaaaatgagtggaccccttgggcctgaagaagcatcccctaagcctgatgacccctgtcctgaaggctggcagagtttccccgcaagtctttcttgttataaggtattccatgcagaaagaattgtaagaaagaggaactgggaagaagctgaacgattctgccaagcccttggagcacacctttctagcttcagccatgtggatgaaataaaggaatttcttcactttttaacggaccagttcagtggccagcattggctgtggattggtttgaataaaaggagcccagatttacaaggatcctggcaatggagtgatcgtacaccagtgtctactattatcatgccaaatgagtttcagcaggattatgacatcagagactgtgctgctgtcaaggtatttcataggccatggcgaagaggctggcatttctatgatgatagagaatttatttatttgaggccttttgcttgtgatacaaaacttgaatgggtgtgccaaattccaaaaggccgtactccaaaaacaccagactggtacaatccagaccgtgctggaattcatggacctccacttataattgaaggaagtgaatattggtttgttgctgatcttcacctaaactatgaagaagccgtcctgtactgtgccagcaatcacagctttcttgcaactataacatcttttgtgggactaaaagccatcaaaaacaaaatagcaaatatatctggtgatggacagaagtggtggataagaattagcgagtggccaatagatgatcattttacatactcacgatatccatggcaccgctttcctgtgacatttggagaggaatgcttgtacatgtctgccaagacttggcttatcgacttaggtaaaccaacagactgtagtaccaagttgcccttcatctgtgaaaaatataatgtttcttcgttagagaaatacagcccagattctgcagctaaagtgcaatgttctgagcaatggattccttttcagaataagtgttttctaaagatcaaacccgtgtctctcacattttctcaagcaagcgatacctgtcactcctatggtggcacccttccttcagtgttgagccagattgaacaagactttattacatccttgcttccggatatggaagctactttatggattggtttgcgctggactgcctatgaaaagataaacaaatggacagataacagagagctgacgtacagtaactttcacccattattggttagtgggaggctgagaataccagaaaatttttttgaggaagagtctcgctaccactgtgccctaatactcaacctccaaaaatcaccgtttactgggacgtggaattttacatcctgcagtgaacgccactttgtgtctctctgtcagaaatattcagaagttaaaagcagacagacgttgcagaatgcttcagaaactgtaaagtatctaaataatctgtacaaaataatcccaaagactctgacttggcacagtgctaaaagggagtgtctgaaaagtaacatgcagctggtgagcatcacggacccttaccagcaggcattcctcagtgtgcaggcgctccttcacaactcttccttatggatcggactcttcagtcaagatgatgaactcaactttggttggtcagatgggaaacgtcttcattttagtcgctgggctgaaactaatgggcaactcgaagactgtgtagtattagacactgatggattctggaaaacagttgattgcaatgacaatcaaccaggtgctatttgctactattcaggaaatgagactgaaaaagaggtcaaaccagttgacagtgttaaatgtccatctcctgttctaaatactccgtggataccatttcagaactgttgctacaatttcataataacaaagaataggcatatggcaacaacacaggatgaagttcatactaaatgccagaaactgaatccaaaatcacatattctgagtattcgagatgaaaaggagaataactttgttcttgagcaactgctgtacttcaattatatggcttcatgggtcatgttaggaataacttatagaaataagtctcttatgtggtttgataagaccccactgtcatatacacattggagagcaggaagaccaactataaaaaatgagaagtttttggctggtttaagtactgacggcttctgggatattcaaacctttaaagttattgaagaagcagtttattttcaccagcacagcattcttgcttgtaaaattgaaatggttgactacaaagaagaatataatactacactgccacagtttatgccatatgaagatggtatttacagtgttattcaaaaaaaggtaacatggtatgaagcattaaacatgtgttctcaaagtggaggtcacttggcaagcgttcacaaccaaaatggccagctctttctggaagatattgtaaaacgtgatggatttccactatgggttgggctctcaagtcatgatggaagtgaatcaagttttgaatggtctgatggtagtacatttgactatatcccatggaaaggccaaacatctcctggaaattgtgttctcttggatccaaaaggaacttggaaacatgaaaaatgcaactctgttaaggatggtgctatttgttataaacctacaaaatctaaaaagctgtcccgtcttacatattcatcaagatgtccagcagcaaaagagaatgggtcacggtggatccagtacaagggtcactgttacaagtctgatcaggcattgcacagtttttcagaggccaaaaaattgtgttcaaaacatgatcactctgcaactatcgtttccataaaagatgaagatgagaataaatttgtgagcagactgatgagggaaaataataacattaccatgagagtttggcttggattatctcaacattctgttgaccagtcttggagttggttagatggatcagaagtgacatttgtcaaatgggaaaataaaagtaagagtggtgttggaagatgtagcatgttgatagcttcaaatgaaacttggaaaaaagttgaatgtgaacatggttttggaagagttgtctgcaaagtgcctctggactgtccttcatctacttggattcagttccaagacagttgttacatttttctccaagaagccatcaaagtagaaagcatagaggatgtcagaaatcagtgtactgaccatggagcggacatgataagcatacataatgaagaagaaaatgcttttatactggatactttgaaaaagcaatggaaaggcccagatgatatcctactaggcatgttttatgacacagatgatgcgagtttcaagtggtttgataattcaaatatgacatttgataagtggacagaccaagatgatgatgaggatttagttgacacctgtgcttttctgcacatcaagacaggtgaatggaaaaaaggaaattgtgaagtttcttctgtggaaggaacactatgcaaaacagctatcccatacaaaaggaaatatttatcagataaccacattttaatatcagcattggtgattgctagcacggtaattttgacagttttgggagcaatcatttggttcctgtacaaaaaacattctgattctcgtttcaccacagttttttcaaccgcaccccaatcaccttataatgaagactgtgttttggtagttggagaagaaaatgaatatcctgttcaatttgactaa

SEQ ID NO: 182 - DNA, 468 bp, Homo sapiens
cagacagccctgagatcacctaaaaagctgctaccaagacagccacgaagatcctaccaaaatgaagcgcttcctcttcctcctactcaccatcagcctcctggttatggtacagatacaaactggactctcaggacaaaacgacaccagccaaaccagcagcccctcagcatccagcaacataagcggaggcattttccttttcttcgtggccaatgccataatccacctcttctgcttcagttgaggtgacacgtctcagccttagccctgtgccccctgaaacagctgccaccatcactcgcaagagaatcccctccatctttgggaggggttgatgccagacatcaccaggttgtagaagttgacaggcagtgccatgggggcaacagccaaaataggggggtaatgatgtaggggccaagcagtgcccagctgggggtcaataaagttacccttgtacttgca

SEQ ID NO: 183 - DNA, 1035 bp, Homo sapiens
tctctggctgtcacccggcttggccccttccacacccaactggggcaagcctgacccggcgacaggaggcatgaggggcccccggccgaaatgacagtgctggcgccagcctggagcccaacaacctatctcctcctgctgctgctgctgagctcgggactcagtgggacccaggactgctccttccaacacagccccatctcctccgacttcgctgtcaaaatccgtgagctgtctgactacctgcttcaagattacccagtcaccgtggcctccaacctgcaggacgaggagctctgcgggggcctctggcggctggtcctggcacagcgctggatggagcggctcaagactgtcgctgggtccaagatgcaaggcttgctggagcgcgtgaacacggagatacactttgtcaccaaatgtgcctttcagcccccccccagctgtcttcgcttcgtccagaccaacatctcccgcctcctgcaggagacctccgagcagctggtggcgctgaagccctggatcactcgccagaacttctcccggtgcctggagctgcagtgtcagcccgactcctcaaccctgccacccccatggagtccccggcccctggaggccacagccccgacagccccgcagccccctctgctcctcctactgctgctgcccgtgggcctcctgctgctggccgctgcctggtgcctgcactggcagaggacgcggcggaggacaccccgccctggggagcaggtgccccccgtccccagtccccaggacctgctgcttgtggagcactgacctggccaaggcctcatcctggggaggatactgaggcacacagaggggagtcaccagccagaggatgcatagcctggacacagaggaagttggctagaggccggtcccttccttgggcccctctcattccctccccagaatggaggcaacgccagaatccagcaccggccccatttacccaactctgtacaaagcccttgtccccatgaaattgtatataaatcatccttttctacc

SEQ ID NO: 184 - DNA, 627 bp, Homo sapiens
tctctggctgtcacccggcttggccccttccacacccaactggggcaagcctgacccggcgacaggaggcatgaggggcccccggccgaaatgacagtgctggcgccagcctggagcccaacaacctatctcctcctgctgctgctgctgagctcgggactcagtgggacccaggactgctccttccaacacagccccatctcctccgacttcgctgtcaaaatccgtgagctgtctgactacctgcttcaagattacccagtcaccgtggcctccaacctgcaggacgaggagctctgcgggggcctctggcggctggtcctggcacagcgctggatggagcggctcaagactgtcgctgggtccaagatgcaaggcttgctggagcgcgtgaacacggagatacactttgtcaccaaatgtgcctttcagcccccccccagctgtcttcgcttcgtccagaccaacatctcccgcctcctgcaggagacctccgagcagctggtggcgctgaagccctggatcactcgccagaacttctcccggtgcctggagctgcagtgtcagcccgtagagacggtgtttcaccgtgtcagccaggatggtctcgatctcctgacctcgtga

SEQ ID NO: 185 - DNA, 1076 bp, Homo sapiens
ggggcatgagggtccgagacttgttcttctgtcccttccaagacccggcgacaggaggcatgaggggcccccggccgaaatgacagtgctggcgccagcctggagcccaacaacctatctcctcctgctgctgctgctgagctcgggactcagtgggacccaggactgctccttccaacacagccccatctcctccgacttcgctgtcaaaatccgtgagctgtctgactacctgcttcaagattacccagtcaccgtggcctccaacctgcaggacgaggagctctgcgggggcctctggcggctggtcctggcacagcgctggatggagcggctcaagactgtcgctgggtccaagatgcaaggcttgctggagcgcgtgaacacggagatacactttgtcaccaaatgtgcctttcagcccccccccagctgtcttcgcttcgtccagaccaacatctcccgcctcctgcaggagacctccgagcagctggtggcgctgaagccctggatcactcgccagaacttctcccggtgcctggagctgcagtgtcagcccgactcctcaaccctgccacccccatggagtccccggcccctggaggccacagccccgacagccccgcagccccctctgctcctcctactgctgctgcccgtgggcctcctgctgctggccgctgcctggtgcctgcactggcagaggacgcggcggaggacaccccgccctggggagcaggtgccccccgtccccagtccccaggacctgctgcttgtggagcactgacctggccaaggcctcatcctgcggagccttaaacaacgcagtgagacagacatctatcatcccattttacaggggaggatactgaggcacacagaggggagtcaccagccagaggatgcatagcctggacacagaggaagttggctagaggccggtcccttccttgggcccctctcattccctccccagaatggaggcaacgccagaatccagcaccggccccatttacccaactctgtacaaagcccttgtccccatgaaattgtatataaatcatccttttctacca

SEQ ID NO: 186 - DNA, 560 bp, Homo sapiens
ttaaaagggtgggagcgtccgggggcccatctctctcgggtggagtcttctgacagctggtgcgcctgcccgggaacatcctcctggactcaatcatggcttgtggtctggtcgccagcaacctgaatctcaaacctggagagtgccttcgagtgcgaggcgaggtggctcctgacgctaagagcttcgtgctgaacctgggcaaagacagcaacaacctgtgcctgcacttcaaccctcgcttcaacgcccacggcgacgccaacaccatcgtgtgcaacagcaaggacggcggggcctgggggaccgagcagcgggaggctgtctttcccttccagcctggaagtgttgcagaggtgtgcatcaccttcgaccaggccaacctgaccgtcaagctgccagatggatacgaattcaagttccccaaccgcctcaacctggaggccatcaactacatggcagctgacggtgacttcaagatcaaatgtgtggcctttgactgaaatcagccagcccatggcccccaataaaggcagctgcctctgctccctctgaaccag

SEQ ID NO: 187 - DNA, 4207 bp, Homo sapiens
ggtggggcagctgagcggcctgctcctcctcgggccgtgaccccggggtctggcgcggggtgggacccgggggcgggtttgcgcaaaatgtgccgagactgcccgggagaggagctgcggccgcgctgagccagagccatgagaccccagatcctgctgctcctggccctgctgaccctaggcctggctgcacaacaccaagacaaagtgccctgtaagatggtggacaagaaggtctcgtgccaggttctgggcctgctccaggtcccctcggtgctcccgccagacactgagacccttgatctatctgggaaccagctgcggagtatcctggcctcacccctgggcttctacacagcacttcgtcacctggacctgagcaccaatgagatcagcttcctccagccaggagccttccaggccctgacccacctggagcacctcagcctggctcacaaccggctggcgatggccactgcgctgagtgctggtggcctgggccccctgccacgcgtgacctccctggacctgtctgggaacagcctgtacagcggcctgctggagcggctgctgggggaggcacccagcctgcataccctctcactggcggagaacagtctgactcgcctcacccgccacaccttccgggacatgcctgcgctggagcagcttgacctgcatagcaacgtgctgatggacatcgaggatggcgccttcgagggtctgccccgcctgacccatctcaacctctccaggaattccctcacctgcatctccgacttcagcctccagcagctgcgggtgctagacctgagctgcaacagcatcgaggcctttcagacggcctcccagccccaggctgagttccagctcacctggcttgacctgcgggagaacaaactgctccatttccccgacctggccgcgctcccgagactcatctacctgaacttgtccaacaacctcatccggctccccacagggccaccccaggacagcaagggcatccacgcaccttccgagggctggtcagccctgcccctctcagcccccagcgggaatgccagcggccgccccctttcccagctcttgaatctggatttgagctacaatgagattgagctcatccccgacagctttcttgagcacctgacctccctgtgcttcctgaacctcagcagaaactgcttgcggacctttgaggcccggcgcttaggctccctgccctgcctgatgctccttgacttaagccacaatgccctggagacactggaactgggcgccagagccctggggtctctgcggacgctgctcctacagggcaatgccctgcgggacctgcccccatacacctttgccaatctggccagcctgcagcggctcaacctgcaggggaaccgagtcagcccctgtggggggccagatgagcctggcccctccggctgtgtggccttctccggcatcacctccctccgcagcctgagcctggtggataatgagatagagctgctcagggcaggggccttcctccacaccccactgactgagctggacctttcttccaatcctgggctggaggtggccacgggggccttgggaggcctggaggcctccttggaggtcctggcactgcagggcaacgggctgatggtcctgcaggtggacctgccctgcttcatctgcctcaagcggctcaatcttgccgagaaccgcctgagccaccttcccgcctggacacaggctgtgtcactggaggtgctggacctgcgaaacaacagcttcagcctcctgccaggcagtgccatgggtggcctggagaccagcctccggcgcctctacctgcaggggaatccactcagctgctgcggcaatggctggctggcagcccagctgcaccagggccgtgtggacgtggacgccacccaggacctgatctgccgcttcagctcccaggaggaggtgtccctgagccacgtgcgtcctgaggactgtgagaaggggggactgaagaacatcaacctcatcatcatcctcaccttcatactggtctctgccatcctcctcaccacgctggccgcctgctgctgcgtccgccggcagaagtttaaccaacagtataaagcctaaagaagccgggagacactctaggtcagtgggggagcctgaggtacagagaagagtgaggactgactcaaggtcacacagtgatccgggatcccagaactctggtctccaaattacagcccaggacacctttctctgccgcctgctgcatcagtgggtgacccccttcccgggctgcactttgggtccagctgtggaagccagaagttgggcggtttcagggacagccgagaataatgttgacctgtcagatcaacaaatcttcactgagcatgtattttgtgccacaccctgctctgggcactgggaatgctgggaaatgagatacattcccgccctcaagaatctcccagtctggtaggagagagtgctgcagagccacgtggccgccacgcagtgtgcttagggcctgaggtgtgaaagcccagggctccagagctcggcaggccccgctggtttggtgcggtgagtcctgccccggctgtgccagggtgagggagggccaagcccaggaggatttgtctgagacatttccaagcagactgtttgtcacgtcttctgagaatgactttcagtctctctgaaaatgaaaagcttaggaccagaagagagaattggagctgtacgagtgtgtctcggatctggtgttgttaggtgggccacggcggctccagcagggtctggttaaggggtccagcccagcactggaccattccgtctcctgctctggacttgccctctcccttcctggcactctcatgttgcataccctgaccccagtgctgctctaagcaccgtccctgcccagccccacttctccatcgcagccccaccttggctgctgagccaggagctaaaaccttagatatctggttctgttttgcacccagcttggcagatgtggatttgaatccaagccttgtgtctgcccctatgtgacagctctatattttatccccgttttataaaagaggaaactgaagttctgaaaatctccttccagggccccagctaactaatgccataggtgagattcaaaccttcatccttctgtctccagggcctgatctttaccactgcaggggctgcaggccgttaagtggacaggaagtggccccacatagcccgagcagggtctggaagcatcctgtgctgtgcacacctgctctctcctctctcccaggcaggcagctgcaggcgctctcctccttctctgcctgtttccctcctcccttcctttccaccctggtgtgggttctcctgttctctctgtgctcttgcattctctcattcccttttcctctattgagcagagcctggagtttgagactatggaatccaacctccccattgcacagatggggaaactgaggcttaggaagagaatgaaacttgtggagagcttatacagagcctctgggggaaaaaagagcccttatttgtggggtgagattgggggttggaccagagtgatgtcctctctcagctatcacatcacaagataatgctggctccaaacttcctttctgtgcctcatcatgcaaggatcttttttccctcttacaaaaacaggtaaaaagcctcacccagatgacccccatccctcataccatggagtcatgagctgtctgggaagaatggacgtgctgggaccaactcaagaccttgttttgctgtcttcatcatcttacctgtgcttggcccacagtctggctcatgatgtgggctcagtaatgtgcgagaaagtgaaaatgccactctctccaccccattttacagaggagaacaccaaggcccagaggaagttaagggagagtcaatgggcagagccagggctaggccctggtggtgtgtggagcacccaggcagacccagtcctggttgggatcacacccacgggtgctactgcacgtaacactcctccttaggcctggaggccaaggtgtgggtccccacgcctgatctttgaaaacactacacagggctgctgtcacttcccagggcccaggcctcagcccaggcctcgggaccaactctttgtataacctacctgaatgtattaaaaactaattttggagaagca

SEQ ID NO: 188 - DNA, 2656 bp, Homo sapiens
ggtggggcagctgagcggcctgctcctcctcgggccgtgaccccggggtctggcgcggggtgggacccgggggcgggtttgcgcaaaatgtgccgagactgcccgggagaggagctgcggccgcgctgagccagagccatgagaccccagatcctgctgctcctggccctgctgaccctaggcctggctgcacaacaccaagacaaagtgccctgtaagatggtggacaagaaggtctcgtgccaggttctgggcctgctccaggtcccctcggtgctcccgccagacactgagacccttgatctatctgggaaccagctgcggagtatcctggcctcacccctgggcttctacacagcacttcgtcacctggacctgagcaccaatgagatcagcttcctccagccaggagccttccaggccctgacccacctggagcacctcagcctggctcacaaccggctggcgatggccactgcgctgagtgctggtggcctgggccccctgccacgcgtgacctccctggacctgtctgggaacagcctgtacagcggcctgctggagcggctgctgggggaggcacccagcctgcataccctctcactggcggagaacagtctgactcgcctcacccgccacaccttccgggacatgcctgcgctggagcagcttgacctgcatagcaacgtgctgatggacatcgaggatggcgccttcgagggtctgccccgcctgacccatctcaacctctccaggaattccctcacctgcatctccgacttcagcctccagcagctgcgggtgctagacctgagctgcaacagcatcgaggcctttcagacggcctcccagccccaggctgagttccagctcacctggcttgacctgcgggagaacaaactgctccatttccccgacctggccgcgctcccgagactcatctacctgaacttgtccaacaacctcatccggctccccacagggccaccccaggacagcaagggcatccacgcaccttccgagggctggtcagccctgcccctctcagcccccagcgggaatgccagcggccgccccctttcccagctcttgaatctggatttgagctacaatgagattgagctcatccccgacagctttcttgagcacctgacctccctgtgcttcctgaacctcagcagaaactgcttgcggacctttgaggcccggcgcttaggctccctgccctgcctgatgctccttgacttaagccacaatgccctggagacactggaactgggcgccagagccctggggtctctgcggacgctgctcctacagggcaatgccctgcgggacctgcccccatacacctttgccaatctggccagcctgcagcggctcaacctgcaggggaaccgagtcagcccctgtggggggccagatgagcctggcccctccggctgtgtggccttctccggcatcacctccctccgcagcctgagcctggtggataatgagatagagctgctcagggcaggggccttcctccacaccccactgactgagctggacctttcttccaatcctgggctggaggtggccacgggggccttgggaggcctggaggcctccttggaggtcctggcactgcagggcaacgggctgatggtcctgcaggtggacctgccctgcttcatctgcctcaagcggctcaatcttgccgagaaccgcctgagccaccttcccgcctggacacaggctgtgtcactggaggtgctggacctgcgaaacaacagcttcagcctcctgccaggcagtgccatgggtggcctggagaccagcctccggcgcctctacctgcaggggaatccactcagctgctgcggcaatggctggctggcagcccagctgcaccagggccgtgtggacgtggacgccacccaggacctgatctgccgcttcagctcccaggaggaggtgtccctgagccacgtgcgtcctgaggactgtgagaaggggggactgaagaacatcaacctcatcatcatcctcaccttcatactggtctctgccatcctcctcaccacgctggccgcctgctgctgcgtccgccggcagaagtttaaccaacagtataaagcctaaagaagccgggagacactctaggtaaaaagcctcacccagatgacccccatccctcataccatggagtcatgagctgtctgggaagaatggacgtgctgggaccaactcaagaccttgttttgctgtcttcatcatcttacctgtgcttggcccacagtctggctcatgatgtgggctcagtaatgtgcgagaaagtgaaaatgccactctctccaccccattttacagaggagaacaccaaggcccagaggaagttaagggagagtcaatgggcagagccagggctaggccctggtggtgtgtggagcacccaggcagacccagtcctggttgggatcacacccacgggtgctactgcacgtaacactcctccttaggcctggaggccaaggtgtgggtccccacgcctgatctttgaaaacactacacagggctgctgtcacttcccagggcccaggcctcagcccaggcctcgggaccaactctttgtataacctacctgaatgtattaaaaactaattttggagaa

SEQ ID NO: 189 - DNA, 4311 bp, Homo sapiens
gtccgcagcagctctcccaggaccccactctgccagtaagtcagctgaggccgagaggagggagagaggacctcagaggccagactgtgagctagtctgccctgctcctgcgtgtgaggggtcgttggcagggcttagggaaggagaccttgatttggtatagtgggaacatttgctttggagacagatgaactggattctgatcgtgaccctgctattttctccttgtgtgactttggagccatgagaccccagatcctgctgctcctggccctgctgaccctaggcctggctgcacaacaccaagacaaagtgccctgtaagatggtggacaagaaggtctcgtgccaggttctgggcctgctccaggtcccctcggtgctcccgccagacactgagacccttgatctatctgggaaccagctgcggagtatcctggcctcacccctgggcttctacacagcacttcgtcacctggacctgagcaccaatgagatcagcttcctccagccaggagccttccaggccctgacccacctggagcacctcagcctggctcacaaccggctggcgatggccactgcgctgagtgctggtggcctgggccccctgccacgcgtgacctccctggacctgtctgggaacagcctgtacagcggcctgctggagcggctgctgggggaggcacccagcctgcataccctctcactggcggagaacagtctgactcgcctcacccgccacaccttccgggacatgcctgcgctggagcagcttgacctgcatagcaacgtgctgatggacatcgaggatggcgccttcgagggtctgccccgcctgacccatctcaacctctccaggaattccctcacctgcatctccgacttcagcctccagcagctgcgggtgctagacctgagctgcaacagcatcgaggcctttcagacggcctcccagccccaggctgagttccagctcacctggcttgacctgcgggagaacaaactgctccatttccccgacctggccgcgctcccgagactcatctacctgaacttgtccaacaacctcatccggctccccacagggccaccccaggacagcaagggcatccacgcaccttccgagggctggtcagccctgcccctctcagcccccagcgggaatgccagcggccgccccctttcccagctcttgaatctggatttgagctacaatgagattgagctcatccccgacagctttcttgagcacctgacctccctgtgcttcctgaacctcagcagaaactgcttgcggacctttgaggcccggcgcttaggctccctgccctgcctgatgctccttgacttaagccacaatgccctggagacactggaactgggcgccagagccctggggtctctgcggacgctgctcctacagggcaatgccctgcgggacctgcccccatacacctttgccaatctggccagcctgcagcggctcaacctgcaggggaaccgagtcagcccctgtggggggccagatgagcctggcccctccggctgtgtggccttctccggcatcacctccctccgcagcctgagcctggtggataatgagatagagctgctcagggcaggggccttcctccacaccccactgactgagctggacctttcttccaatcctgggctggaggtggccacgggggccttgggaggcctggaggcctccttggaggtcctggcactgcagggcaacgggctgatggtcctgcaggtggacctgccctgcttcatctgcctcaagcggctcaatcttgccgagaaccgcctgagccaccttcccgcctggacacaggctgtgtcactggaggtgctggacctgcgaaacaacagcttcagcctcctgccaggcagtgccatgggtggcctggagaccagcctccggcgcctctacctgcaggggaatccactcagctgctgcggcaatggctggctggcagcccagctgcaccagggccgtgtggacgtggacgccacccaggacctgatctgccgcttcagctcccaggaggaggtgtccctgagccacgtgcgtcctgaggactgtgagaaggggggactgaagaacatcaacctcatcatcatcctcaccttcatactggtctctgccatcctcctcaccacgctggccgcctgctgctgcgtccgccggcagaagtttaaccaacagtataaagcctaaagaagccgggagacactctaggtcagtgggggagcctgaggtacagagaagagtgaggactgactcaaggtcacacagtgatccgggatcccagaactctggtctccaaattacagcccaggacacctttctctgccgcctgctgcatcagtgggtgacccccttcccgggctgcactttgggtccagctgtggaagccagaagttgggcggtttcagggacagccgagaataatgttgacctgtcagatcaacaaatcttcactgagcatgtattttgtgccacaccctgctctgggcactgggaatgctgggaaatgagatacattcccgccctcaagaatctcccagtctggtaggagagagtgctgcagagccacgtggccgccacgcagtgtgcttagggcctgaggtgtgaaagcccagggctccagagctcggcaggccccgctggtttggtgcggtgagtcctgccccggctgtgccagggtgagggagggccaagcccaggaggatttgtctgagacatttccaagcagactgtttgtcacgtcttctgagaatgactttcagtctctctgaaaatgaaaagcttaggaccagaagagagaattggagctgtacgagtgtgtctcggatctggtgttgttaggtgggccacggcggctccagcagggtctggttaaggggtccagcccagcactggaccattccgtctcctgctctggacttgccctctcccttcctggcactctcatgttgcataccctgaccccagtgctgctctaagcaccgtccctgcccagccccacttctccatcgcagccccaccttggctgctgagccaggagctaaaaccttagatatctggttctgttttgcacccagcttggcagatgtggatttgaatccaagccttgtgtctgcccctatgtgacagctctatattttatccccgttttataaaagaggaaactgaagttctgaaaatctccttccagggccccagctaactaatgccataggtgagattcaaaccttcatccttctgtctccagggcctgatctttaccactgcaggggctgcaggccgttaagtggacaggaagtggccccacatagcccgagcagggtctggaagcatcctgtgctgtgcacacctgctctctcctctctcccaggcaggcagctgcaggcgctctcctccttctctgcctgtttccctcctcccttcctttccaccctggtgtgggttctcctgttctctctgtgctcttgcattctctcattcccttttcctctattgagcagagcctggagtttgagactatggaatccaacctccccattgcacagatggggaaactgaggcttaggaagagaatgaaacttgtggagagcttatacagagcctctgggggaaaaaagagcccttatttgtggggtgagattgggggttggaccagagtgatgtcctctctcagctatcacatcacaagataatgctggctccaaacttcctttctgtgcctcatcatgcaaggatcttttttccctcttacaaaaacaggtaaaaagcctcacccagatgacccccatccctcataccatggagtcatgagctgtctgggaagaatggacgtgctgggaccaactcaagaccttgttttgctgtcttcatcatcttacctgtgcttggcccacagtctggctcatgatgtgggctcagtaatgtgcgagaaagtgaaaatgccactctctccaccccattttacagaggagaacaccaaggcccagaggaagttaagggagagtcaatgggcagagccagggctaggccctggtggtgtgtggagcacccaggcagacccagtcctggttgggatcacacccacgggtgctactgcacgtaacactcctccttaggcctggaggccaaggtgtgggtccccacgcctgatctttgaaaacactacacagggctgctgtcacttcccagggcccaggcctcagcccaggcctcgggaccaactctttgtataacctacctgaatgtattaaaaactaattttggagaagc

SEQ ID NO: 190 - DNA, 801 bp, Homo sapiens
gtccgcagcagctctcccaggaccccactctgccagtaagtcagctgaggccgagaggagggagagaggacctcagaggccagactgtgagctagtctgccctgctcctgcgtgtgaggggtcgttggcagggcttagggaaggagaccttgatttggtatagtgggaacatttgctttggagacagatgaactggattctgatcgtgaccctgctattttctccttgtgtgactttggagccatgagaccccagatcctgctgctcctggccctgctgaccctaggcctggctgcacaacaccaagacaaagtgccctgtaagatggtggacaagaaggtctcgtgccaggttctgggcctgctccaggtcccctcggtgctcccgccagacactgagacccttgatctatctgggaaccagctgcggagtatcctggcctcacccctgggcttctacacagcacttcgtcacctggacctgagcaccaatgagatcagcttcctccagccaggagccttccaggccctgacccacctggagcacctcagcctggctcacaaccggctggcgatggccactgcgctgagtgctggtggcctgggccccctgccacgcgtgacctccctggacctgtctgggaacagcctgtacagcggcctgctggagcggctgctgggggaggcacccagcctgcataccctctcactggcggagaacagtctgactcgcctcacccgccacaccttccgggacatgcctgcgctggagcagcttgacctgcatagcaacgtgctgatg

SEQ ID NO: 191 - DNA, 2097 bp, Homo sapiens
tgagaagggcaaatgctatcattggaaaaactgacaaaagtcccaataggaaaaataaggaagtggagagttactatgtttctaatttttcatgtgcttctatttttttcctacttcagagccattgactaatagttgagtataacacaggttgtgtttccgggctgctgaaacatgacactaatattttcaaagaactgtggaagcctaaaaggaagccaatgagaaataactaaatgagagtttaggactgcagccttcattttcattcaaagatttaaaagtttccataaagtaaaatgttcttctccggccacctgttttcatagttctgtgttttccttcaggcctttctggcttcctatatggcagtaagaaaatgatgtgcttaatgattacaaatttcatatggaatacgaactttcagtttgtacatatgatgcacagagatgcttttgtggttttattggttttcatattacaaacaaagaaactagaaaatgaaaccattccaaaagtggaagtaatttctcactgcccctgtgataaactgtggtcactggctgtggcagcaactattataagatgctctgaaaactcttcagacactgaggggcaccagaggagcagactacaagaatggcacacgctatggaaaactcctggacaatcagtaaagagtaccatattgatgaagaagtgggctttgctctgccaaatccacaggaaaatctacctgatttttataatgactggatgttcattgctaaacatctgcctgatctcatagagtctggccagcttcgagaaagagttgagaagttaaacatgctcagcattgatcatctcacagaccacaagtcacagcgccttgcacgtctagttctgggatgcatcaccatggcatatgtgtggggcaaaggtcatggagatgtccgtaaggtcttgccaagaaatattgctgttccttactgccaactctccaagaaactggaactgcctcctattttggtttatgcagactgtgtcttggcaaactggaagaaaaaggatcctaataagcccctgacttatgagaacatggacgttttgttctcatttcgtgatggagactgcagtaaaggattcttcctggtctctctattggtggaaatagcagctgcttctgcaatcaaagtaattcctactgtattcaaggcaatgcaaatgcaagaacgggacactttgctaaaggcgctgttggaaatagcttcttgcttggagaaagcccttcaagtgtttcaccaaatccacgatcatgtgaacccaaaagcatttttcagtgttcttcgcatatatttgtctggctggaaaggcaacccccagctatcagacggtctggtgtatgaagggttctgggaagacccaaaggagtttgcagggggcagtgcaggccaaagcagcgtctttcagtgctttgacgtcctgctgggcatccagcagactgctggtggaggacatgctgctcagttcctccaggacatgagaagatatatgccaccagctcacaggaacttcctgtgctcattagagtcaaatccctcagtccgtgagtttgtcctttcaaaaggtgatgctggcctgcgggaagcttatgacgcctgtgtgaaagctctggtctccctgaggagctaccatctgcaaatcgtgactaagtacatcctgattcctgcaagccagcagccaaaggagaataagacctctgaagacccttcaaaactggaagccaaaggaactggaggcactgatttaatgaatttcctgaagactgtaagaagtacaactgagaaatcccttttgaaggaaggttaatgtaacccaacaagagcacattttatcatagcagagacatctgtatgcattcctgtcattacccattgtaacagagccacaaactaatactatgcaatgttttaccaataatgcaatacaaaagacctcaaaatacctgtgcatttcttgtaggaaaacaacaaaaggtaattatgtgtaattatactagaagttttgtaatctgtatcttatcattggaataaaatgacattcaataaataaaaa

SEQ ID NO: 192 - DNA, 612 bp, Homo sapiens
ttttctcctattaatctgctttgtcatttgattttcaatgaaccttcagagggcaaaaggaaagttttccctcagctccaacagttttggcccagtgaacaggacaaccaaaactgctctgctcttccgaaaattgcagtcagggaacctgggacccggcaagccagcagaaggaacacagttggagactctggttattttaccaaggctttgactgaaatgccatattttcagatgtgaccagacagctttaagaaactgaggttgatattatgaagcccataggagcttttggaaaaactggtctaatatcctaaatacacggttcacataatgggcttgtgacactgaggggcaccagaggagcagactacaagaatggcacacgctatggaaaactcctggacaatcagtaaagagtaccatattgatgaagaagtgggctttgctctgccaaatccacaggaaaatctacctgatttttataatgactggatgttcattgctaaacatctgcctgatctcatagagtctggccagcttcgagaaagagttgagaagttaaacatgctcagcattgatcatctcacagaccacaagtcacagcgcctt

SEQ ID NO: 193 - DNA, 1138 bp, Homo sapiens
gaacaggacaaccaaaactgctctgctcttccgaaaattgcagtcagggaacctgggacccggcaagccagcagaaggagccattgactaatagttgagtataacacaggttgtgtttccgggctgctgaaacatgacactaatattttcaaagaactgtggaagcctaaaaggaagccaatgagaaataactaaatgagagtttaggactgcagccttcattttcattcaaagatttaaaagtttccataaagtaaaatgttcttctccggccacctgttttcatagttctgtgttttccttcaggcctttctggcttcctatatggcagtaagaaaatgatgtgcttaatgattacaaatttcatatggaatacgaactttcagtttgtacatatgatgcacagagatgcttttgtggttttattggttttcatattacaaacaaagaaactagaaaatgaaaccattccaaaagtggaagtaatttctcactgcccctgtgataaactgtggtcactggctgtggcagcaactattataagatgctctgaaaactcttcagacactgaggggcaccagaggagcagactacaagaatggcacacgctatggaaaactcctggacaatcagtaaagagtaccatattgatgaagaagtgggctttgctctgccaaatccacaggaaaatctacctgatttttataatgactggatgttcattgctaaacatctgcctgatctcatagagtctggccagcttcgagaaagagttgagaagttaaacatgctcagcattgatcatctcacagaccacaagtcacagcgccttgcacgtctagttctgggatgcatcaccatggcatatgtgtggggcaaaggtcatggagatgtccgtaaggtcttgccaagaaatattgctgttccttactgccaactctccaagaaactggaactgcctcctattttggtttatgcagactgtgtcttggcaaactggaagaaaaaggatcctaataagcccctgacttatgagaacatggacgttttgttctcatttcgtgatggagactgcagtaaaggattcttcctggtctctctattggtggaaatagcagctgcttctgcaatcaaagta

SEQ ID NO: 194 - DNA, 1709 bp, Homo sapiens
aggacaaccaaaactgctctgctcttccgaaaattgcagtcagggaacctgggacccggcaagccagcagaaggaggaacgggcaacttggtttcttctttagcttccttgttctcattaagattgaacaatgcctctaaagtgaaccacagacttgcatgcaagctgaaaacctttaccaaatgcagtcttaatttgtactttgagaaaaacattttcaagacactgaggggcaccagaggagcagactacaagaatggcacacgctatggaaaactcctggacaatcagtaaagagtaccatattgatgaagaagtgggctttgctctgccaaatccacaggaaaatctacctgatttttataatgactggatgttcattgctaaacatctgcctgatctcatagagtctggccagcttcgagaaagagttgagaagttaaacatgctcagcattgatcatctcacagaccacaagtcacagcgccttgcacgtctagttctgggatgcatcaccatggcatatgtgtggggcaaaggtcatggagatgtccgtaaggtcttgccaagaaatattgctgttccttactgccaactctccaagaaactggaactgcctcctattttggtttatgcagactgtgtcttggcaaactggaagaaaaaggatcctaataagcccctgacttatgagaacatggacgttttgttctcatttcgtgatggagactgcagtaaaggattcttcctggtctctctattggtggaaatagcagctgcttctgcaatcaaagtaattcctactgtattcaaggcaatgcaaatgcaagaacgggacactttgctaaaggcgctgttggaaatagcttcttgcttggagaaagcccttcaagtgtttcaccaaatccacgatcatgtgaacccaaaagcatttttcagtgttcttcgcatatatttgtctggctggaaaggcaacccccagctatcagacggtctggtgtatgaagggttctgggaagacccaaaggagtttgcagggggcagtgcaggccaaagcagcgtctttcagtgctttgacgtcctgctgggcatccagcagactgctggtggaggacatgctgctcagttcctccaggacatgagaagatatatgccaccagctcacaggaacttcctgtgctcattagagtcaaatccctcagtccgtgagtttgtcctttcaaaaggtgatgctggcctgcgggaagcttatgacgcctgtgtgaaagctctggtctccctgaggagctaccatctgcaaatcgtgactaagtacatcctgattcctgcaagccagcagccaaaggagaataagacctctgaagacccttcaaaactggaagccaaaggaactggaggcactgatttaatgaatttcctgaagactgtaagaagtacaactgagaaatcccttttgaaggaaggttaatgtaacccaacaagagcacattttatcatagcagagacatctgtatgcattcctgtcattacccattgtaacagagccacaaactaatactatgcaatgttttaccaataatgcaatacaaaagacctcaaaatacctgtgcatttcttgtaggaaaacaacaaaaggtaattatgtgtaattatactagaagttttgtaatctgtatcttatcattggaataaaatgacattcaataaat

SEQ ID NO: 195 - DNA, 572 bp, Homo sapiens
aaccaaaactgctctgctcttccgaaaattgcagtcagggaacctgggacccggcaagccagcagaaggagttaaggaaaatgtttgttctgttaagctttacagaaatggaacacagttggagactctggttattttaccaaggctttgactgaaatgccatattttcagatgtgaccagacagctttaagaaactgaggttgatattatgaagcccataggagcttttggaaaaactggtctaatatcctaaatacacggttcacataatgggcttgtgaaactagaaaatgaaaccattccaaaagtggaagtaatttctcactgcccctgtgataaactgtggtcactggctgtggcagcaactattataagatgctctgaaaactcttcagacactgaggggcaccagaggagcagactacaagaatggcacacgctatggaaaactcctggacaatcagtaaagagtaccatattgatgaagaagtgggctttgctctgccaaatccacaggaaaatctacctgatttttataatgactggatgttcattgctaaacatctgcctg

SEQ ID NO: 196 - DNA, 1227 bp, Homo sapiens
atggagccccacagaccgaatgtgaagacagcagtgccattgtctttggaaagctatcacatatctgaagagtatggctttcttcttccagattctctgaaagaacttccagatcattataggccttggatggaaattgccaacaaacttcctcaattgattgatgctcaccagcttcaagctcatgtggacaagatgcccctgctgagctgccagttcctgaagggtcaccgggagcagcgcctggcccacctggtcctgagcttcctcaccatgggttatgtctggcaggaaggagaggcgcagcctgcagaggtcctgccaaggaatcttgcccttccatttgtcgaagtctccaggaacttggggctccctcctatcctggtccactcagacttggtgctgacgaactggaccaaaaaagatccagacggattcctggaaattgggaacctggagaccatcatctcatttcctgggggagagagcctgcatggttttatactggtgactgctttggtagagaaagaagcagtgcctgggataaaggctcttgttcaggccacgaatgctatcttgcagcccaaccaggaggccctgctccaagccctgcagcgactgagactgtctattcaggacatcaccaaaaccttaggacagatgcatgattatgtagatccagacatattttatgcaggcatccggatctttctctctggatggaaagacaacccagcaatgcctgcagggctgatgtatgaaggagtttcccaagagcccctgaaatactccggcgggagtgcagctcagagcacagtgcttcatgcctttgatgagttcttaggcattcgtcatagcaaggaaagtggtgactttctgtacagaatgagggattacatgcctccttcccataaggccttcatagaagacatccactcagcaccttccctgagggactacatcctgtcatctggacaggaccacttgctgacagcttataaccagtgtgtgcaggccctggcagagctgcggagctatcacatcaccatggtcaccaaatacctcatcacagctgcagccaaggcaaagcatgggaagccaaaccatctcccagggcctcctcaggctttaaaagacaggggcacaggtggaaccgcagttatgagctttcttaagagtgtcagggataagaccttggagtcaatccttcacccacgtggttaggag

SEQ ID NO: 197 - DNA, 2294 bp, Homo sapiens
agtccagatgatagttaagaaagcagtaagaatacagagagtccacaatgagatgaaaatgcactgccagttgaaacatcctcctacactggagctttataaatattttaaagacaaggattggattagatttgacattagaaatgtaccataatacagaaggcaatggacacctaaagaacagaatgaaaaccttcttaggaaatgaagcttgacacttcacccaccaggccaccacaagaatgttgcattttcattattatgatacttcaaacaaaataatggagccccacagaccgaatgtgaagacagcagtgccattgtctttggaaagctatcacatatctgaagagtatggctttcttcttccagattctctgaaagaacttccagatcattataggccttggatggaaattgccaacaaacttcctcaattgattgatgctcaccagcttcaagctcatgtggacaagatgcccctgctgagctgccagttcctgaagggtcaccgggagcagcgcctggcccacctggtcctgagcttcctcaccatgggttatgtctggcaggaaggagaggcgcagcctgcagaggtcctgccaaggaatcttgcccttccatttgtcgaagtctccaggaacttggggctccctcctatcctggtccactcagacttggtgctgacgaactggaccaaaaaagatccagacggattcctggaaattgggaacctggagaccatcatctcatttcctgggggagagagcctgcatggttttatactggtgactgctttggtagagaaagaagcagtgcctgggataaaggctcttgttcaggccacgaatgctatcttgcagcccaaccaggaggccctgctccaagccctgcagcgactgagactgtctattcaggacatcaccaaaaccttaggacagatgcatgattatgtagatccagacatattttatgcaggcatccggatctttctctctggatggaaagacaacccagcaatgcctgcagggctgatgtatgaaggagtttcccaagagcccctgaaatactccggcgggagtgcagctcagagcacagtgcttcatgcctttgatgagttcttaggcattcgtcatagcaaggaaagtggtgactttctgtacagaatgagggattacatgcctccttcccataaggccttcatagaagacatccactcagcaccttccctgagggactacatcctgtcatctggacaggaccacttgctgacagcttataaccagtgtgtgcaggccctggcagagctgcggagctatcacatcaccatggtcaccaaatacctcatcacagctgcagccaaggcaaagcatgggaagccaaaccatctcccagggcctcctcaggctttaaaagacaggggcacaggtggaaccgcagttatgagctttcttaagagtgtcagggataagaccttggagtcaatccttcacccacgtggttaggaggctgccctctccccagcaatgcagagcccccatggagggcaggtgggcctggagaatgagggtcagggttctgcctgggatcatccaggaaggatctcagccctattcatgtttctgctctacagagcactatattctccttgttgagagctgttggcttcacaaaggagagttgatgtggccaagcctttccctccctacctgatcactgcttaacggcatgtataatggatacttcctcatgcagaacccccagaggagtgactgtatgccattctctttgccaagtaatagaaaaccaatctaaatgtcaaaaatcagataaaattgcctggggatacattacttgttgattttcttaaaaaacaaattcacttaacaattcattaagttcatactgagcactgcctccaagattaaaaccaggatttctgtggtcccagaccagccctcttctccctgaatgtgttgagttggtggcaggaggttggaaatgctccagtggagatgggaagatagaggatgctgacaataaggacttggaagtcactagtgtgaaaatgagcagttaatgatatgggaacggatgagactttccacgtggtacctagatttgcaaattctattgtaatgcctttatttttagaagaattattctctcttcttactctgaaaatctgtatttgtaaaatgaatgaatggatcctatataagtaaataagaaaactgggaataagtagtaaatcaatgtgtttagtgtgcaaataaatgtaaatgcttttattg

SEQ ID NO: 198 - DNA, 1630 bp, Homo sapiens
acacatcaggggcttgctcttgcaaaaccaaaccacaagacagacttgcaaaagaaggcatgcacagctcagcactgctctgttgcctggtcctcctgactggggtgagggccagcccaggccagggcacccagtctgagaacagctgcacccacttcccaggcaacctgcctaacatgcttcgagatctccgagatgccttcagcagagtgaagactttctttcaaatgaaggatcagctggacaacttgttgttaaaggagtccttgctggaggactttaagggttacctgggttgccaagccttgtctgagatgatccagttttacctggaggaggtgatgccccaagctgagaaccaagacccagacatcaaggcgcatgtgaactccctgggggagaacctgaagaccctcaggctgaggctacggcgctgtcatcgatttcttccctgtgaaaacaagagcaaggccgtggagcaggtgaagaatgcctttaataagctccaagagaaaggcatctacaaagccatgagtgagtttgacatcttcatcaactacatagaagcctacatgacaatgaagatacgaaactgagacatcagggtggcgactctatagactctaggacataaattagaggtctccaaaatcggatctggggctctgggatagctgacccagccccttgagaaaccttattgtacctctcttatagaatatttattacctctgatacctcaacccccatttctatttatttactgagcttctctgtgaacgatttagaaagaagcccaatattataatttttttcaatatttattattttcacctgtttttaagctgtttccatagggtgacacactatggtatttgagtgttttaagataaattataagttacataagggaggaaaaaaaatgttctttggggagccaacagaagcttccattccaagcctgaccacgctttctagctgttgagctgttttccctgacctccctctaatttatcttgtctctgggcttggggcttcctaactgctacaaatactcttaggaagagaaaccagggagcccctttgatgattaattcaccttccagtgtctcggagggattcccctaacctcattccccaaccacttcattcttgaaagctgtggccagcttgttatttataacaacctaaatttggttctaggccgggcgcggtggctcacgcctgtaatcccagcactttgggaggctgaggcgggtggatcacttgaggtcaggagttcctaaccagcctggtcaacatggtgaaaccccgtctctactaaaaatacaaaaattagccgggcatggtggcgcgcacctgtaatcccagctacttgggaggctgaggcaagagaattgcttgaacccaggagatggaagttgcagtgagctgatatcatgcccctgtactccagcctgggtgacagagcaagactctgtctcaaaaaataaaaataaaaataaatttggttctaatagaactcagttttaactagaatttattcaattcctctgggaatgttacattgtttgtctgtcttcatagcagattttaattttgaataaataaatgtatcttattcacatca

SEQ ID NO: 199 - DNA, 1522 bp, Homo sapiens
acggggcgtccggctaaggccggggacccagggtggtgggcggggtgtcccgcccgcctgtggaccccgcgcagtaactgcgaacatttcgctttcattttgggccgagctggaggcggcggggccgtcccggaacggctgcggccgggcaccccgggagttaatccgaaagcgccgcaagccccgcgggccggccgcaccgcacgtgtcaccgagaagctgatgtagagagagacacagaaggagacagaaagcaagagaccagagtcccgggaaagtcctgccgcgcctcgggacaattataaaaatgtggccccctgggtcagcctcccagccaccgccctcacctgccgcggccacaggtctgcatccagcggctcgccctgtgtccctgcagtgccggctcagcatgtgtccagcgcgcagcctcctccttgtggctaccctggtcctcctggaccacctcagtttggccagaaacctccccgtggccactccagacccaggaatgttcccatgccttcaccactcccaaaacctgctgagggccgtcagcaacatgctccagaaggccagacaaactctagaattttacccttgcacttctgaagagattgatcatgaagatatcacaaaagataaaaccagcacagtggaggcctgtttaccattggaattaaccaagaatgagagttgcctaaattccagagagacctctttcataactaatgggagttgcctggcctccagaaagacctcttttatgatggccctgtgccttagtagtatttatgaagacttgaagatgtaccaggtggagttcaagaccatgaatgcaaagcttctgatggatcctaagaggcagatctttctagatcaaaacatgctggcagttattgatgagctgatgcaggccctgaatttcaacagtgagactgtgccacaaaaatcctcccttgaagaaccggatttttataaaactaaaatcaagctctgcatacttcttcatgctttcagaattcgggcagtgactattgatagagtgatgagctatctgaatgcttcctaaaaagcgaggtccctccaaaccgttgtcatttttataaaactttgaaatgaggaaactttgataggatgtggattaagaactagggagggggaaagaaggatgggactattacatccacatgatacctctgatcaagtatttttgacatttactgtggataaattgtttttaagttttcatgaatgaattgctaagaagggaaaatatccatcctgaaggtgtttttcattcactttaatagaagggcaaatatttataagctatttctgtaccaaagtgtttgtggaaacaaacatgtaagcataacttattttaaaatatttatttatataacttggtaatcatgaaagcatctgagctaacttatatttatttatgttatatttattaaattatttatcaagtgtatttgaaaaatatttttaagtgttctaaaaataaaagtattgaatt

SEQ ID NO: 200 - DNA, 1283 bp, Homo sapiens
cgtgtcaccgagaagctgatgtagagagagacacagaaggagacagaaagcaagagaccagagtcccgggaaagtcctgccgcgcctcgggacaattataaaaatgtggccccctgggtcagcctcccagccaccgccctcacctgccgcggccacaggtctgcatccagcggctcgccctgtgtccctgcagtgccggctcagcatgtgtccagcgcgcagcctcctccttgtggctaccctggtcctcctggaccacctcagtttggccagaaacctccccgtggccactccagacccaggaatgttcccatgccttcaccactcccaaaacctgctgagggccgtcagcaacatgctccagaaggccagacaaactctagaattttacccttgcacttctgaagagattgatcatgaagatatcacaaaagataaaaccagcacagtggaggcctgtttaccattggaattaaccaagaatgggagttgcctggcctccagaaagacctcttttatgatggccctgtgccttagtagtatttatgaagacttgaagatgtaccaggtggagttcaagaccatgaatgcaaagcttctgatggatcctaagaggcagatctttctagatcaaaacatgctggcagttattgatgagctgatgcaggccctgaatttcaacagtgagactgtgccacaaaaatcctcccttgaagaaccggatttttataaaactaaaatcaagctctgcatacttcttcatgctttcagaattcgggcagtgactattgatagagtgatgagctatctgaatgcttcctaaaaagcgaggtccctccaaaccgttgtcatttttataaaactttgaaatgaggaaactttgataggatgtggattaagaactagggagggggaaagaaggatgggactattacatccacatgatacctctgatcaagtatttttgacatttactgtggataaattgtttttaagttttcatgaatgaattgctaagaagggaaaatatccatcctgaaggtgtttttcattcactttaatagaagggcaaatatttataagctatttctgtaccaaagtgtttgtggaaacaaacatgtaagcataacttattttaaaatatttatttatataacttggtaatcatgaaagcatctgagctaacttatatttatttatgttatatttattaaattatttatcaagtgtatttgaaaaatatttttaagtgttctaaaaataaaagtattgaattaaagtga

SEQ ID NO: 201 - DNA, 863 bp, Homo sapiens
cgtgtcaccgagaagctgatgtagagagagacacagaaggagacagaaagcaagagaccagagtcccgggaaagtcctgccgcgcctcgggacaattataaaaatgtggccccctgggtcagcctcccagccaccgccctcacctgccgcggccacaggtctgcatccagcggctcgccctgtgtccctgcagtgccggctcagcatgtgtccagcgcgcagcctcctccttgtggctaccctggtcctcctggaccacctcagtttggccagaaacctccccgtggccactccagacccaggaatgttcccatgccttcaccactcccaaaacctgctgagggccgtcagcaacatgctccagaagaatgagagttgcctaaattccagagagacctctttcataactaatgggagttgcctggcctccagaaagacctcttttatgatggccctgtgccttagtagtatttatgaagacttgaagatgtaccaggtggagttcaagaccatgaatgcaaagcttctgatggatcctaagaggcagatctttctagatcaaaacatgctggcagttattgatgagctgatgcaggccctgaatttcaacagtgagactgtgccacaaaaatcctcccttgaagaaccggatttttataaaactaaaatcaagctctgcatacttcttcatgctttcagaattcgggcagtgactattgatagagtgatgagctatctgaatgcttcctaaaaagcgaggtccctccaaaccgttgtcatttttataaaactttgaaatgaggaaactttgataggatgtggattaagaactagggagggggaaagaaggatgggactattac

SEQ ID NO: 202 - DNA, 1128 bp, Homo sapiens
ccgcagccatgaccccgcagcttctcctggcccttgtcctctgggccagctgcccgccctgcagtggaaggaaagggcccccagcagctctgacactgccccgggtgcaatgccgagcctctcggtacccgatcgccgtggattgctcctggaccctgccgcctgctccaaactccaccagccccgtgtccttcattgccacgtacaggctcggcatggctgcccggggccacagctggccctgcctgcagcagacgccaacgtccaccagctgcaccatcacggatgtccagctgttctccatggctccctacgtgctcaatgtcaccgccgtccacccctggggctccagcagcagcttcgtgcctttcataacagagcacatcatcaagcccgaccctccagaaggcgtgcgcctaagccccctcgctgagcgccagctacaggtgcagtgggagcctcccgggtcctggcccttcccagagatcttctcactgaagtactggatccgttacaagcgtcagggagctgcgcgcttccaccgggtggggcccattgaagccacgtccttcatcctcagggctgtgcggccccgagccaggtactacgtccaagtggcggctcaggacctcacagactacggggaactgagtgactggagtctccccgccactgccacaatgagcctgggcaagtagcaagggcttcccgctgcctccagacagcacctgggtcctcgccaccctaagccccgggacacctgttggagggcggatgggatctgcctagcctgggctggagtccttgctttgctgctgctgagctgccgggcaacctcagatgaccgacttttccctttgagcctcagtttctctagctgagaaatggagatgtactactctctcctttacctttacctttaccacagtgcagggctgactgaactgtcactgtgagatattttttattgtttaattagaaaagaattgttgttgggctgggcgcagtggatcgcacctgtaatcccagtcactgggaagccgacgtgggagggtagcttgaggccaggagctcgaaaccagtccgggccacacagcaagaccccatctctaaaaaattaatataaat

SEQ ID NO: 203 - DNA, 772 bp, Homo sapiens
cttcattccattttctgttgagtaataaactcaacgttgaaaatgtcctttgtgggggagaactcaggagtgaaaatgggctctgaggactgggaaaaagatgaaccccagtgctgcttagaagacccggctggaagccccctggaaccaggcccaagcctccccaccatgaattttgttcacacaagtccaaaggtgaagaacttaaacccgaagaaattcagcattcatgaccaggatcacaaagtactggtcctggactctgggaatctcatagcagttccagataaaaactacatacgcccagagatcttctttgcattagcctcatccttgagctcagcctctgcggagaaaggaagtccgattctcctgggggtctctaaaggggagttttgtctctactgtgacaaggataaaggacaaagtcatccatcccttcagctgaagaaggagaaactgatgaagctggctgcccaaaaggaatcagcacgccggcccttcatcttttatagggctcaggtgggctcctggaacatgctggagtcggcggctcaccccggatggttcatctgcacctcctgcaattgtaatgagcctgttggggtgacagataaatttgagaacaggaaacacattgaattttcatttcaaccagtttgcaaagctgaaatgagccccagtgaggtcagcgattaggaaactgccccattgaacgccttcctcgctaatttgaactaattgtataaaaacaccaaacctgctcactaaa

SEQ ID NO: 204 - DNA, 652 bp, Homo sapiens
atgtcaggctgtgataggagggaaacagaaaccaaaggaaagaacagctttaagaagcgcttaagaggtccaaaggtgaagaacttaaacccgaagaaattcagcattcatgaccaggatcacaaagtactggtcctggactctgggaatctcatagcagttccagataaaaactacatacgcccagagatcttctttgcattagcctcatccttgagctcagcctctgcggagaaaggaagtccgattctcctgggggtctctaaaggggagttttgtctctactgtgacaaggataaaggacaaagtcatccatcccttcagctgaagaaggagaaactgatgaagctggctgcccaaaaggaatcagcacgccggcccttcatcttttatagggctcaggtgggctcctggaacatgctggagtcggcggctcaccccggatggttcatctgcacctcctgcaattgtaatgagcctgttggggtgacagataaatttgagaacaggaaacacattgaattttcatttcaaccagtttgcaaagctgaaatgagccccagtgaggtcagcgattaggaaactgccccattgaacgccttcctcgctaatttgaactaattgtataaaaacaccaaacctgctcactaaa

SEQ ID NO: 205 - DNA, 589 bp, Homo sapiens
cttcattccattttctgttgagtaataaactcaacgttgaaaatgtcctttgtgggggagaactcaggagtgaaaatgggctctgaggactgggaaaaagatgaaccccagtgctgcttagaagagatcttctttgcattagcctcatccttgagctcagcctctgcggagaaaggaagtccgattctcctgggggtctctaaaggggagttttgtctctactgtgacaaggataaaggacaaagtcatccatcccttcagctgaagaaggagaaactgatgaagctggctgcccaaaaggaatcagcacgccggcccttcatcttttatagggctcaggtgggctcctggaacatgctggagtcggcggctcaccccggatggttcatctgcacctcctgcaattgtaatgagcctgttggggtgacagataaatttgagaacaggaaacacattgaattttcatttcaaccagtttgcaaagctgaaatgagccccagtgaggtcagcgattaggaaactgccccattgaacgccttcctcgctaatttgaactaattgtataaaaacaccaaacctgctcactaaa

SEQ ID NO: 206 - DNA, 709 bp, Homo sapiens
cttcattccattttctgttgagtaataaactcaacgttgaaaatgtcctttgtgggggagaactcaggagtgaaaatgggctctgaggactgggaaaaagatgaaccccagtgctgcttagaaggtccaaaggtgaagaacttaaacccgaagaaattcagcattcatgaccaggatcacaaagtactggtcctggactctgggaatctcatagcagttccagataaaaactacatacgcccagagatcttctttgcattagcctcatccttgagctcagcctctgcggagaaaggaagtccgattctcctgggggtctctaaaggggagttttgtctctactgtgacaaggataaaggacaaagtcatccatcccttcagctgaagaaggagaaactgatgaagctggctgcccaaaaggaatcagcacgccggcccttcatcttttatagggctcaggtgggctcctggaacatgctggagtcggcggctcaccccggatggttcatctgcacctcctgcaattgtaatgagcctgttggggtgacagataaatttgagaacaggaaacacattgaattttcatttcaaccagtttgcaaagctgaaatgagccccagtgaggtcagcgattaggaaactgccccattgaacgccttcctcgctaatttgaactaattgtataaaaacaccaaacctgctcactaaa

SEQ ID NO: 207 - DNA, 652 bp, Homo sapiens
cttcattccattttctgttgagtaataaactcaacgttgaaaatgtcctttgtgggggagaactcaggagtgaaaatgggctctgaggactgggaaaaagatgaaccccagtgctgcttagaagacccggctggaagccccctggaaccaggcccaagcctccccaccatgaattttgttcacacaaagatcttctttgcattagcctcatccttgagctcagcctctgcggagaaaggaagtccgattctcctgggggtctctaaaggggagttttgtctctactgtgacaaggataaaggacaaagtcatccatcccttcagctgaagaaggagaaactgatgaagctggctgcccaaaaggaatcagcacgccggcccttcatcttttatagggctcaggtgggctcctggaacatgctggagtcggcggctcaccccggatggttcatctgcacctcctgcaattgtaatgagcctgttggggtgacagataaatttgagaacaggaaacacattgaattttcatttcaaccagtttgcaaagctgaaatgagccccagtgaggtcagcgattaggaaactgccccattgaacgccttcctcgctaatttgaactaattgtataaaaacaccaaacctgctcactaaa

SEQ ID NO: 208 - DNA, 1761 bp, Homo sapiens
catccatctgcacagctggggcccctgggaggagacgccatgatccccaccttcacggctctgctctgcctcgggctgagtctgggccccaggacccacatgcaggcagggcccctccccaaacccaccctctgggctgagccaggctctgtgatcagctgggggaactctgtgaccatctggtgtcaggggaccctggaggctcgggagtaccgtctggataaagaggaaagcccagcaccctgggacagacagaacccactggagcccaagaacaaggccagattctccatcccatccatgacagaggactatgcagggagataccgctgttactatcgcagccctgtaggctggtcacagcccagtgaccccctggagctggtgatgacaggagcctacagtaaacccaccctttcagccctgccgagtcctcttgtgacctcaggaaagagcgtgaccctgctgtgtcagtcacggagcccaatggacactttccttctgatcaaggagcgggcagcccatcccctactgcatctgagatcagagcacggagctcagcagcaccaggctgaattccccatgagtcctgtgacctcagtgcacggggggacctacaggtgcttcagctcacacggcttctcccactacctgctgtcacaccccagtgaccccctggagctcatagtctcaggatccttggaggatcccaggccctcacccacaaggtccgtctcaacagctgcaggccctgaggaccagcccctcatgcctacagggtcagtcccccacagtggtctgagaaggcactgggaggtactgatcggggtcttggtggtctccatcctgcttctctccctcctcctcttcctcctcctccaacactggcgtcagggaaaacacaggacattggcccagagacaggctgatttccaacgtcctccaggggctgccgagccagagcccaaggacgggggcctacagaggaggtccagcccagctgctgacgtccagggagaaaacttctgtgctgccgtgaagaacacacagcctgaggacggggtggaaatggacactcggagcccacacgatgaagacccccaggcagtgacgtatgccaaggtgaaacactccagacctaggagagaaatggcctctcctccctccccactgtctggggaattcctggacacaaaggacagacaggcagaagaggacagacagatggacactgaggctgctgcatctgaagccccccaggatgtgacctacgcccagctgcacagctttaccctcagacagaaggcaactgagcctcctccatcccaggaaggggcctctccagctgagcccagtgtctatgccactctggccatccactaatccaggggggacccagaccccacaagccatggagactcaggaccccagaaggcatggaagctgcctccagtagacatcactgaaccccagccagcccagacccctgacacagaccactagaagattccgggaacgttgggagtcacctgattctgcaaagataaataatatccctgcattatcaaaataaagtagcagacctctcaattcacaatgagttaactgataaaacaaaacagaagtcagacaatgttttaaattgaatgatcatgtaaatattacacatcaaaccaatgacatgggaaaatgggagcttctaatgaggacaaacaaaaaatagagaaaaattaataaagtcaaaatgtttattcttgaaaa

SEQ ID NO: 209 - DNA, 1347 bp, Homo sapiens
atgatccccaccttcacggctctgctctgcctcgggctgagtctgggccccaggacccacatgcaggcagggcccctccccaaacccaccctctgggctgagccaggctctgtgatcagctgggggaactctgtgaccatctggtgtcaggggaccctggaggctcgggagtaccgtctggataaagaggaaagcccagcaccctgggacagacagaacccactggagcccaagaacaaggccagattctccatcccatccatgacagaggactatgcagggagataccgctgttactatcgcagccctgtaggctggtcacagcccagtgaccccctggagctggtgatgacaggagcctacagtaaacccaccctttcagccctgccgagtcctcttgtgacctcaggaaagagcgtgaccctgctgtgtcagtcacggagcccaatggacactttccttctgatcaaggagcgggcagcccatcccctactgcatctgagatcagagcacggagctcagcagcaccaggctgaattccccatgagtcctgtgacctcagtgcacggggggacctacaggtgcttcagctcacacggcttctcccactacctgctgtcacaccccagtgaccccctggagctcatagtctcaggatccttggaggatcccaggccctcacccacaaggtccgtctcaacagctgcaggccctgaggaccagcccctcatgcctacagggtcagtcccccacagtggtctgagaaggcactgggaggtactgatcggggtcttggtggtctccatcctgcttctctccctcctcctcttcctcctcctccaacactggcgtcagggaaaacacaggacattggcccagagacaggctgatttccaacgtcctccaggggctgccgagccagagcccaaggacgggggcctacagaggaggtccagcccagctgctgacgtccagggagaaaacttctgtgctgccgtgaagaacacacagcctgaggacggggtggaaatggacactcggcagagcccacacgatgaagacccccaggcagtgacgtatgccaaggtgaaacactccagacctaggagagaaatggcctctcctccctccccactgtctggggaattcctggacacaaaggacagacaggcagaagaggacagacagatggacactgaggctgctgcatctgaagccccccaggatgtgacctacgcccagctgcacagctttaccctcagacagaaggcaactgagcctcctccatcccaggaaggggcctctccagctgagcccagtgtctatgccactctggccatccactaa

SEQ ID NO: 210 - DNA, 1225 bp, Homo sapiens
agctgcacggctcctggccccggagcatgcgcgagagccgccccggagcgccccggagccccccgccgtcccgcccgcggcgtcccgcgccccgccgccagcgcacccccggacgctatggcccacccctccggctggccccttctgtaggatggtagcacacaaccaggtggcagccgacaatgcagtctccacagcagcagagccccgacggcggccagaaccttcctcctcttcctcctcctcgcccgcggcccccgcgcgcccgcggccgtgccccgcggtcccggccccggcccccggcgacacgcacttccgcacattccgttcgcacgccgattaccggcgcatcacgcgcgccagcgcgctcctggacgcctgcggattctactgggggcccctgagcgtgcacggggcgcacgagcggctgcgcgccgagcccgtgggcaccttcctggtgcgcgacagccgccagcggaactgctttttcgcccttagcgtgaagatggcctcgggacccacgagcatccgcgtgcactttcaggccggccgctttcacctggatggcagccgcgagagcttcgactgcctcttcgagctgctggagcactacgtggcggcgccgcgccgcatgctgggggccccgctgcgccagcgccgcgtgcggccgctgcaggagctgtgccgccagcgcatcgtggccaccgtgggccgcgagaacctggctcgcatccccctcaaccccgtcctccgcgactacctgagctccttccccttccagatttgaccggcagcgcccgccgtgcacgcagcattaactgggatgccgtgttattttgttattacttgcctggaaccatgtgggtaccctccccggcctgggttggagggagcggatgggtgtaggggcgaggcgcctcccgccctcggctggagacgaggccgcagaccccttctcacctcttgagggggtcctccccctcctggtgctccctctgggtccccctggttgttgtagcagcttaactgtatctggagccaggacctgaactcgcacctcctacctcttcatgtttacatatacccagtatctttgcacaaaccaggggttgggggagggtctctggctttatttttctgctgtgcagaatcctattttatattttttaaagtcagtttaggtaataaactttattatgaaagttttttttttaaaaaaaaataa

SEQ ID NO: 211 - DNA, 636 bp, Homo sapiens
atggtagcacacaaccaggtggcagccgacaatgcagtctccacagcagcagagccccgacggcggccagaaccttcctcctcttcctcctcctcgcccgcggcccccgcgcgcccgcggccgtgccccgcggtcccggccccggcccccggcgacacgcacttccgcacattccgttcgcacgccgattaccggcgcatcacgcgcgccagcgcgctcctggacgcctgcggattctactgggggcccctgagcgtgcacggggcgcacgagcggctgcgcgccgagcccgtgggcaccttcctggtgcgcgacagccgccagcggaactgctttttcgcccttagcgtgaagatggcctcgggacccacgagcatccgcgtgcactttcaggccggccgctttcacctggatggcagccgcgagagcttcgactgcctcttcgagctgctggagcactacgtggcggcgccgcgccgcatgctgggggccccgctgcgccagcgccgcgtgcggccgctgcaggagctgtgccgccagcgcatcgtggccaccgtgggccgcgagaacctggctcgcatccccctcaaccccgtcctccgcgactacctgagctccttccccttccagatttga

SEQ ID NO: 212 - DNA, 2199 bp, Homo sapiens
ccccgccgccgccgcccttcgcgccctgggccatctccctcccacctccctccgcggagcagccagacagcgagggccccggccgggggcaggggggacgccccgtccggggcacccccccggctctgagccgcccgcggggccggcctcggcccggagcggaggaaggagtcgccgaggagcagcctgaggccccagagtctgagacgagccgccgccgcccccgccactgcggggaggagggggaggaggagcgggaggagggacgagctggtcgggagaagaggaaaaaaacttttgagacttttccgttgccgctgggagccggaggcgcggggacctcttggcgcgacgctgccccgcgaggaggcaggacttggggaccccagaccgcctccctttgccgccggggacgcttgctccctccctgccccctacacggcgtccctcaggcgcccccattccggaccagccctcgggagtcgccgacccggcctcccgcaaagacttttccccagacctcgggcgcaccccctgcacgccgccttcatccccggcctgtctcctgagcccccgcgcatcctagaccctttctcctccaggagacggatctctctccgacctgccacagatcccctattcaagaccacccaccttctggtaccagatcgcgcccatctaggttatttccgtgggatactgagacacccccggtccaagcctcccctccaccactgcgcccttctccctgaggacctcagctttccctcgaggccctcctaccttttgccgggagacccccagcccctgcaggggcggggcctccccaccacaccagccctgttcgcgctctcggcagtgccggggggcgccgcctcccccatgccgccctccgggctgcggctgctgccgctgctgctaccgctgctgtggctactggtgctgacgcctggccggccggccgcgggactatccacctgcaagactatcgacatggagctggtgaagcggaagcgcatcgaggccatccgcggccagatcctgtccaagctgcggctcgccagccccccgagccagggggaggtgccgcccggcccgctgcccgaggccgtgctcgccctgtacaacagcacccgcgaccgggtggccggggagagtgcagaaccggagcccgagcctgaggccgactactacgccaaggaggtcacccgcgtgctaatggtggaaacccacaacgaaatctatgacaagttcaagcagagtacacacagcatatatatgttcttcaacacatcagagctccgagaagcggtacctgaacccgtgttgctctcccgggcagagctgcgtctgctgaggctcaagttaaaagtggagcagcacgtggagctgtaccagaaatacagcaacaattcctggcgatacctcagcaaccggctgctggcacccagcgactcgccagagtggttatcttttgatgtcaccggagttgtgcggcagtggttgagccgtggaggggaaattgagggctttcgccttagcgcccactgctcctgtgacagcagggataacacactgcaagtggacatcaacgggttcactaccggccgccgaggtgacctggccaccattcatggcatgaaccggcctttcctgcttctcatggccaccccgctggagagggcccagcatctgcaaagctcccggcaccgccgagccctggacaccaactattgcttcagctccacggagaagaactgctgcgtgcggcagctgtacattgacttccgcaaggacctcggctggaagtggatccacgagcccaagggctaccatgccaacttctgcctcgggccctgcccctacatttggagcctggacacgcagtacagcaaggtcctggccctgtacaaccagcataacccgggcgcctcggcggcgccgtgctgcgtgccgcaggcgctggagccgctgcccatcgtgtactacgtgggccgcaagcccaaggtggagcagctgtccaacatgatcgtgcgctcctgcaagtgcagctgaggtcccgccccgccccgccccgccccggcaggcccggccccaccccgccccgcccccgctgccttgcccatgggggctgtatttaaggacacccgtgccccaagcccacctggggccccattaaagatggagagaggactgcgg

SEQ ID NO: 213 - DNA, 534 bp, Artificial Sequence
  Description of Artificial Sequence: Synthetic Transcript Sequence
atgcacagcagcgccctgctgtgctgcctggtgctgctgaccggcgtgcgcgccagccccggccagggcacccagagcgagaacagctgcacccacttccccggcaacctgcccaacatgctgcgcgacctgcgcgacgccttcagccgcgtgaagaccttcttccagatgaaggaccagctggacaacctgctgctgaaggagagcctgctggaggacttcaagggctacctgggctgccaggccctgagcgagatgatccagttctacctggaggaggtgatgccccaggccgagaaccaggaccccgacatcaaggcccacgtgaacagcctgggcgagaacctgaagaccctgcgcctgcgcctgcgccgctgccaccgcttcctgccctgcgagaacaagagcaaggccgtggagcaggtgaagaacgccttcaacaagctgcaggagaagggcatctacaaggccatgagcgagttcgacatcttcatcaactacatcgaggcctacatgaccatgaagatccgcaac

SEQ ID NO: 214 - DNA, 633 bp, Artificial Sequence
  Description of Artificial Sequence: Synthetic Transcript Sequence
atggtcgcccacaatcaagtcgccgccgataacgccgtgtcaaccgctgcagaacctcgccgccgcccggagccgtcctcatcgagctcaagctcgcccgctgcgcctgcccggccacgcccgtgcccagctgtgccggcgccagcccctggggacacccacttcagaactttccgctctcatgctgactacagaaggatcactcgtgcatccgccctgctggacgcgtgcggcttctactggggtccgttgagcgtgcatggagcgcacgagcggcttcgcgccgaaccggtggggacgttccttgttcgggattccaggcagcgaaactgtttctttgcgttgtcagtcaagatggcctcgggacctacttcgatcagagtgcacttccaagcgggccggttccacctggacggatcgcgcgagtcctttgactgcctcttcgaactgctggaacattacgtggccgcacccagacggatgctgggagctccactccgccagcggcgcgtcagaccgctgcaagaactctgcagacagcggattgtggcaaccgtgggaagggagaacctggcacgcatccccctcaatccggtgctgcgggattacctctccagctttccattccagatc

SEQ ID NO: 215 - DNA, 633 bp, Artificial Sequence
  Description of Artificial Sequence: Synthetic Transcript Sequence
atggtcgcccacaatcaagtcgccgctgataacgctgtttccactgccgccgaaccacgccgccgtcctgaaccgtcatcgtcatcgagctcgagccccgcggcgcctgcccgccctagaccgtgccctgctgtgccagccccagcacccggtgacacccactttcgcacgttcagaagccatgccgattacaggcggatcactagagcatccgcgctcctggacgcctgcgggttctactggggaccactgtccgtgcatggagcacacgagcggcttcgcgctgagcccgtgggcaccttccttgtgcgcgacagcagacagcggaattgtttctttgcgctgtcagtgaagatggcttctggaccgacctcaatccgggtgcacttccaagccggacgcttccatttggacggctcccgcgaatcctttgattgcttgttcgagctgctggagcactacgtggcagccccgcgccggatgctgggagcaccgctgcgccagcggcgggtccggccgctccaagaactgtgcagacagaggattgtcgcgactgtggggcgagaaaacctcgcgaggatcccgctcaacccggtgctcagagactacctgtcgtcgttcccattccagatc

SEQ ID NO: 216 - RNA, 695 nt, Artificial Sequence
  Description of Artificial Sequence: Synthetic Transcript Sequence
gggaaauaagagagaaaagaagaguaagaagaaauauaagagccaccaugcauagcucagcccucuuguguugccugguucuucuuacgggagugcgggcuucgccaggccaagggacucaguccgaaaacucguguacccacuuucccggaaaccugccuaacaugcuucgggaucucagagaugcguucucgcgcgucaagaccuucuuccaaaugaaggaccaacucgauaaccugcuucucaaagaaucacugcuugaggacuuuaaggguuaucuugguugucaggcauuguccgagaugauccaguuuuaccuugaggaagugaugccgcaagcggaaaaccaggauccagacauuaaggcacaugugaauagccuuggagaaaaucucaaaacccugaggcugcgucugcgaagaugccacagauuucugccuugugagaauaagucuaaggcaguggagcaggucaagaacgcauucaacaagcugcaagaaaaaggcauauacaaagccauguccgaauuugauaucuuuaucaacuacauugaagcauacaugacuaugaagauucgcaauugauaauaggcuggagccucgguggccaugcuucuugccccuugggccuccccccagccccuccuccccuuccugcacccguacccccguggucuuugaauaaagucugagugg

SEQ ID NO: 217 - DNA, 822 bp, Artificial Sequence
  Description of Artificial Sequence: Synthetic Transcript Sequence
taatacgactcactatagggaaataagagagaaaagaagagtaagaagaaatataagagccaccatggtcgcccacaatcaagtcgccgccgataacgccgtgtcaaccgctgcagaacctcgccgccgcccggagccgtcctcatcgagctcaagctcgcccgctgcgcctgcccggccacgcccgtgcccagctgtgccggcgccagcccctggggacacccacttcagaactttccgctctcatgctgactacagaaggatcactcgtgcatccgccctgctggacgcgtgcggcttctactggggtccgttgagcgtgcatggagcgcacgagcggcttcgcgccgaaccggtggggacgttccttgttcgggattccaggcagcgaaactgtttctttgcgttgtcagtcaagatggcctcgggacctacttcgatcagagtgcacttccaagcgggccggttccacctggacggatcgcgcgagtcctttgactgcctcttcgaactgctggaacattacgtggccgcacccagacggatgctgggagctccactccgccagcggcgcgtcagaccgctgcaagaactctgcagacagcggattgtggcaaccgtgggaagggagaacctggcacgcatccccctcaatccggtgctgcgggattacctctccagctttccattccagatctgataataggctggagcctcggtggccatgcttcttgccccttgggcctccccccagcccctcctccccttcctgcacccgtacccccgtggtctttgaataaagtctgagtgggcggctctaga

SEQ ID NO: 218 - DNA, 844 bp, Artificial Sequence
  Description of Artificial Sequence: Synthetic Transcript Sequence
taatacgactcactatagggaaataagagagaaaagaagagtaagaagaaatataagagccaccatggtcgcccacaatcaagtcgccgctgataacgctgtttccactgccgccgaaccacgccgccgtcctgaaccgtcatcgtcatcgagctcgagccccgcggcgcctgcccgccctagaccgtgccctgctgtgccagccccagcacccggtgacacccactttcgcacgttcagaagccatgccgattacaggcggatcactagagcatccgcgctcctggacgcctgcgggttctactggggaccactgtccgtgcatggagcacacgagcggcttcgcgctgagcccgtgggcaccttccttgtgcgcgacagcagacagcggaattgtttctttgcgctgtcagtgaagatggcttctggaccgacctcaatccgggtgcacttccaagccggacgcttccatttggacggctcccgcgaatcctttgattgcttgttcgagctgctggagcactacgtggcagccccgcgccggatgctgggagcaccgctgcgccagcggcgggtccggccgctccaagaactgtgcagacagaggattgtcgcgactgtggggcgagaaaacctcgcgaggatcccgctcaacccggtgctcagagactacctgtcgtcgttcccattccagatctgataataggctggagcctcggtggccatgcttcttgccccttgggcctccccccagcccctcctccccttcctgcacccgtaccccccaaacaccattgtcacactccagtggtctttgaataaagtctgagtgggcggctctaga

SEQ ID NO: 219 - RNA, 1316 nt, Artificial Sequence
  Description of Artificial Sequence: Synthetic Transcript Sequence
gggaaauaagagagaaaagaagaguaagaagaaauauaagagccaccaugcccccaucgggauugagauuguugccccuucugcuuccgcugcuuugguugcucguccugaccccuggcaggcccgcagcgggguugucgacguguaagacgauugacauggagcucgugaaacgcaagagaauugaagcaaucaggggucaaauucugagcaaacucagacucgcauccccaccgucccagggugaggucccaccgggaccucugcccgaggcgguccuggccuuguacaacucgacacgcgaccgagucgcaggggagucagcggaacccgagcccgaacccgaggccgacuacuacgccaaagaggucacucgggucuugaugguggaaacucacaacgaaaucuacgacaaguuuaagcagucgacccauucgaucuacauguucuucaauaccagcgagcuuagagaagcgguccccgagccgguacuuuuguccagagcggagcugcgguugcucaggcucaagcugaaaguggaacagcacguagagcuuuaucagaaguacagcaacaauucauggcgguaucucucgaaccggcuguuggcgccgucggauucacccgaauggcucagcuuugaugucacggggguggugcgccagugguuguccaggggcggagagaucgaaggauuucggcucucagcccacuguucgugugauagcagggacaacacgcuccaaguagauaucaacggauucacuacuggucgcagaggggaucuugcgacaauccacgguaugaaucgcccuuuucuccugcugauggccacaccccuugaacgggcgcaacaucuucagucaucccgccauaggagagcacuggacacgaacuacuguuuuucgucgacagagaagaauugcugcgugcggcagcuuuacaucgacuuccgaaaagaucucggguggaaauggauucaugaaccgaagggguaucacgccaacuucugccuggguccguguccuuauaucuggucguuggauacacaguauucaaagguguuggcucuuuacaaucagcacaacccgggagccucggcugcgccuuguugcguaccccaggcauuggagccauugccgauuguguauuaugugggaagaaagccgaaaguggagcaguugucgaauaugaucguacggagcugcaaaugcuccugauaagcugccuucugcggggcuugccuucuggccaugcccuucuucucucccuugcaccuguaccucuuggucuuugaauaaagccugaguaggaag

SEQ ID NO: 220 - DNA, 531 bp, Artificial Sequence
  Description of Artificial Sequence: Synthetic Transcript Sequence
atgagaatcttcgccgtgttcatcttcatgacctactggcacctgctgaacgccccctacaacaagatcaaccagagaatcctggtggtggaccccgtgaccagcgagcacgagctgacctgccaggccgagggctaccccaaggccgaggtgatctggaccagcagcgaccaccaggtgctgagcggcaagaccaccaccaccaacagcaagagagaggagaagctgttcaacgtgaccagcaccctgagaatcaacaccaccaccaacgagatcttctactgcaccttcagaagactggaccccgaggagaaccacaccgccgagctggtgatccccgagctgcccctggcccacccccccaacgagagaacccacctggtgatcctgggcgccatcctgctgtgcctgggcgtggccctgaccttcatcttcagactgagaaagggcagaatgatggacgtgaagaagtgcggcatccaggacaccaacagcaagaagcagagcgacacccacctggaggagacctag

SEQ ID NO: 221 - DNA, 873 bp, Artificial Sequence
  Description of Artificial Sequence: Synthetic Transcript Sequence
atgagaatcttcgccgtgttcatcttcatgacctactggcacctgctgaacgccttcaccgtgaccgtgcccaaggacctgtacgtggtggagtacggcagcaacatgaccatcgagtgcaagttccccgtggagaagcagctggacctggccgccctgatcgtgtactgggagatggaggacaagaacatcatccagttcgtgcacggcgaggaggacctgaaggtgcagcacagcagctacagacagagagccagactgctgaaggaccagctgagcctgggcaacgccgccctgcagatcaccgacgtgaagctgcaggacgccggcgtgtacagatgcatgatcagctacggcggcgccgactacaagagaatcaccgtgaaggtgaacgccccctacaacaagatcaaccagagaatcctggtggtggaccccgtgaccagcgagcacgagctgacctgccaggccgagggctaccccaaggccgaggtgatctggaccagcagcgaccaccaggtgctgagcggcaagaccaccaccaccaacagcaagagagaggagaagctgttcaacgtgaccagcaccctgagaatcaacaccaccaccaacgagatcttctactgcaccttcagaagactggaccccgaggagaaccacaccgccgagctggtgatccccgagctgcccctggcccacccccccaacgagagaacccacctggtgatcctgggcgccatcctgctgtgcctgggcgtggccctgaccttcatcttcagactgagaaagggcagaatgatggacgtgaagaagtgcggcatccaggacaccaacagcaagaagcagagcgacacccacctggaggagacctag

SEQ ID NO: 222 - DNA, 612 bp, Artificial Sequence
  Description of Artificial Sequence: Synthetic Transcript Sequence
atggtgagactgcccctgcagtgcgtgctgtggggctgcctgctgaccgccgtgcaccccgagccccccaccgcctgcagagagaagcagtacctgatcaacagccagtgctgcagcctgtgccagcccggccagaagctggtgagcgactgcaccgagttcaccgagaccgagtgcctgccctgcggcgagagcgagttcctggacacctggaacagagagacccactgccaccagcacaagtactgcgaccccaacctgggcctgagagtgcagcagaagggcaccagcgagaccgacaccatctgcacctgcgaggagggctggcactgcaccagcgaggcctgcgagagctgcgtgctgcacagaagctgcagccccggcttcggcgtgaagcagatcgccaccggcgtgagcgacaccatctgcgagccctgccccgtgggcttcttcagcaacgtgagcagcgccttcgagaagtgccacccctggaccagaagccccggcagcgccgagagccccggcggcgacccccaccacctgagagaccccgtgtgccaccccctgggcgccggcctgtaccagaagggcggccaggaggccaaccagtag

SEQ ID NO: 223 - DNA, 786 bp, Artificial Sequence
  Description of Artificial Sequence: Synthetic Transcript Sequence
ggcagaagccccctgagaaccagagacagagtgctgaccaactgggaggacggcctgaccgtggcctacggcgccgtgaagctgatccagagcctgagcctgcagcccgtgggctggcagcagaactggggcctgagcagcccccccaccatgctgctgcccagcagagcccagagccccaccgagctgcccctggcccccctggccgagcccaacaccggctgcagcagcctgctgagctggcacagcaccagaggcgagctgcacctgtgggccctgggcctgggccagatgggcggcagcaagtgcggcagccccctgagccccctggcccccaccctggaggccctgagaagaccctggtgcggccagcagggcgccggcggcaccagaggcatcagcaccgacccccccagcggcaagggcggcagagcctggggcagagaccccctgcccagagagggcctgctgagaggcaccgccgcccccgccgccggcggcgacctgaccccctgcctgagcagaccccccacccccagcagaaaccccagaagaagcatcttccccaccatcttcctggcccccaccctgctgctgcagtgcagaagactgtacatggacgccaacagaagccccagaagaatggccaagagagtggccagccagtgcagaagagacagcgaggccgcccccacccaggagtgcggccacgtgggcaagcaggccgtgggccagagagcctggtgctgctgctgctgcggcgtgagagtgagaggctggcactag

SEQ ID NO: 224 - DNA, 834 bp, Artificial Sequence
  Description of Artificial Sequence: Synthetic Transcript Sequence
atggtgagactgcccctgcagtgcgtgctgtggggctgcctgctgaccgccgtgcaccccgagccccccaccgcctgcagagagaagcagtacctgatcaacagccagtgctgcagcctgtgccagcccggccagaagctggtgagcgactgcaccgagttcaccgagaccgagtgcctgccctgcggcgagagcgagttcctggacacctggaacagagagacccactgccaccagcacaagtactgcgaccccaacctgggcctgagagtgcagcagaagggcaccagcgagaccgacaccatctgcacctgcgaggagggctggcactgcaccagcgaggcctgcgagagctgcgtgctgcacagaagctgcagccccggcttcggcgtgaagcagatcgccaccggcgtgagcgacaccatctgcgagccctgccccgtgggcttcttcagcaacgtgagcagcgccttcgagaagtgccacccctggaccagctgcgagaccaaggacctggtggtgcagcaggccggcaccaacaagaccgacgtggtgtgcggcccccaggacagactgagagccctggtggtgatccccatcatcttcggcatcctgttcgccatcctgctggtgctggtgttcatcaagaaggtggccaagaagcccaccaacaaggccccccaccccaagcaggagccccaggagatcaacttccccgacgacctgcccggcagcaacaccgccgcccccgtgcaggagaccctgcacggctgccagcccgtgacccaggaggacggcaaggagagcagaatcagcgtgcaggagagacagtag

SEQ ID NO: 225 - DNA, 723 bp, Artificial Sequence
  Description of Artificial Sequence: Synthetic Transcript Sequence
atgatcgagacctacaaccagaccagccccagaagcgccgccaccggcctgcccatcagcatgaagatcttcatgtacctgctgaccgtgttcctgatcacccagatgatcggcagcgccctgttcgccgtgtacctgcacagaagactggacaagatcgaggacgagagaaacctgcacgaggacttcgtgttcatgaagaccatccagagatgcaacaccggcgagagaagcctgagcctgctgaactgcgaggagatcaagagccagttcgagggcttcgtgaaggacatcatgctgaacaaggaggagaccaagaaggagaacagcttcgagatgcagaaggtgctgcagtgggccgagaagggctactacaccatgagcaacaacctggtgaccctggagaacggcaagcagctgaccgtgaagagacagggcctgtactacatctacgcccaggtgaccttctgcagcaacagagaggccagcagccaggcccccttcatcgccagcctgtgcctgaagagccccggcagattcgagagaatcctgctgagagccgccaacacccacagcagcgccaagccctgcggccagcagagcatccacctgggcggcgtgttcgagctgcagcccggcgccagcgtgttcgtgaacgtgaccgaccccagccaggtgagccacggcaccggcttcaccagcttcggcctgctgaagctgtag

SEQ ID NO: 226 - DNA, 786 bp, Artificial Sequence
  Description of Artificial Sequence: Synthetic Transcript Sequence
atgatcgagacctacaaccagaccagccccagaagcgccgccaccggcctgcccatcagcatgaagatcttcatgtacctgctgaccgtgttcctgatcacccagatgatcggcagcgccctgttcgccgtgtacctgcacagaagactggacaagatcgaggacgagagaaacctgcacgaggacttcgtgttcatgaagaccatccagagatgcaacaccggcgagagaagcctgagcctgctgaactgcgaggagatcaagagccagttcgagggcttcgtgaaggacatcatgctgaacaaggaggagaccaagaaggagaacagcttcgagatgcagaagggcgaccagaacccccagatcgccgcccacgtgatcagcgaggccagcagcaagaccaccagcgtgctgcagtgggccgagaagggctactacaccatgagcaacaacctggtgaccctggagaacggcaagcagctgaccgtgaagagacagggcctgtactacatctacgcccaggtgaccttctgcagcaacagagaggccagcagccaggcccccttcatcgccagcctgtgcctgaagagccccggcagattcgagagaatcctgctgagagccgccaacacccacagcagcgccaagccctgcggccagcagagcatccacctgggcggcgtgttcgagctgcagcccggcgccagcgtgttcgtgaacgtgaccgaccccagccaggtgagccacggcaccggcttcaccagcttcggcctgctgaagctgtag

SEQ ID NO: 227 - DNA, 5169 bp, Artificial Sequence
  Description of Artificial Sequence: Synthetic Transcript Sequence
atgagaaccggctgggccacccccagaagacccgccggcctgctgatgctgctgttctggttcttcgacctggccgagcccagcggcagagccgccaacgaccccttcaccatcgtgcacggcaacaccggcaagtgcatcaagcccgtgtacggctggatcgtggccgacgactgcgacgagaccgaggacaagctgtggaagtgggtgagccagcacagactgttccacctgcacagccagaagtgcctgggcctggacatcaccaagagcgtgaacgagctgagaatgttcagctgcgacagcagcgccatgctgtggtggaagtgcgagcaccacagcctgtacggcgccgccagatacagactggccctgaaggacggccacggcaccgccatcagcaacgccagcgacgtgtggaagaagggcggcagcgaggagagcctgtgcgaccagccctaccacgagatctacaccagagacggcaacagctacggcagaccctgcgagttccccttcctgatcgacggcacctggcaccacgactgcatcctggacgaggaccacagcggcccctggtgcgccaccaccctgaactacgagtacgacagaaagtggggcatctgcctgaagcccgagaacggctgcgaggacaactgggagaagaacgagcagttcggcagctgctaccagttcaacacccagaccgccctgagctggaaggaggcctacgtgagctgccagaaccagggcgccgacctgctgagcatcaacagcgccgccgagctgacctacctgaaggagaaggagggcatcgccaagatcttctggatcggcctgaaccagctgtacagcgccagaggctgggagtggagcgaccacaagcccctgaacttcctgaactgggaccccgacagacccagcgcccccaccatcggcggcagcagctgcgccagaatggacgccgagagcggcctgtggcagagcttcagctgcgaggcccagctgccctacgtgtgcagaaagcccctgaacaacaccgtggagctgaccgacgtgtggacctacagcgacaccagatgcgacgccggctggctgcccaacaacggcttctgctacctgctggtgaacgagagcaacagctgggacaaggcccacgccaagtgcaaggccttcagcagcgacctgatcagcatccacagcctggccgacgtggaggtggtggtgaccaagctgcacaacgaggacatcaaggaggaggtgtggatcggcctgaagaacatcaacatccccaccctgttccagtggagcgacggcaccgaggtgaccctgacctactgggacgagaacgagcccaacgtgccctacaacaagacccccaactgcgtgagctacctgggcgagctgggccagtggaaggtgcagagctgcgaggagaagctgaagtacgtgtgcaagagaaagggcgagaagctgaacgacgccagcagcgacaagatgtgcccccccgacgagggctggaagagacacggcgagacctgctacaagatctacgaggacgaggtgcccttcggcaccaactgcaacctgaccatcaccagcagattcgagcaggagtacctgaacgacctgatgaagaagtacgacaagagcctgagaaagtacttctggaccggcctgagagacgtggacagctgcggcgagtacaactgggccaccgtgggcggcagaagaagagccgtgaccttcagcaactggaacttcctggagcccgccagccccggcggctgcgtggccatgagcaccggcaagagcgtgggcaagtgggaggtgaaggactgcagaagcttcaaggccctgagcatctgcaagaagatgagcggccccctgggccccgaggaggccagccccaagcccgacgacccctgccccgagggctggcagagcttccccgccagcctgagctgctacaaggtgttccacgccgagagaatcgtgagaaagagaaactgggaggaggccgagagattctgccaggccctgggcgcccacctgagcagcttcagccacgtggacgagatcaaggagttcctgcacttcctgaccgaccagttcagcggccagcactggctgtggatcggcctgaacaagagaagccccgacctgcagggcagctggcagtggagcgacagaacccccgtgagcaccatcatcatgcccaacgagttccagcaggactacgacatcagagactgcgccgccgtgaaggtgttccacagaccctggagaagaggctggcacttctacgacgacagagagttcatctacctgagacccttcgcctgcgacaccaagctggagtgggtgtgccagatccccaagggcagaacccccaagacccccgactggtacaaccccgacagagccggcatccacggcccccccctgatcatcgagggcagcgagtactggttcgtggccgacctgcacctgaactacgaggaggccgtgctgtactgcgccagcaaccacagcttcctggccaccatcaccagcttcgtgggcctgaaggccatcaagaacaagatcgccaacatcagcggcgacggccagaagtggtggatcagaatcagcgagtggcccatcgacgaccacttcacctacagcagatacccctggcacagattccccgtgaccttcggcgaggagtgcctgtacatgagcgccaagacctggctgatcgacctgggcaagcccaccgactgcagcaccaagctgcccttcatctgcgagaagtacaacgtgagcagcctggagaagtacagccccgacagcgccgccaaggtgcagtgcagcgagcagtggatccccttccagaacaagtgcttcctgaagatcaagcccgtgagcctgaccttcagccaggccagcgacacctgccacagctacggcggcaccctgcccagcgtgctgagccagatcgagcaggacttcatcaccagcctgctgcccgacatggaggccaccctgtggatcggcctgagatggaccgcctacgagaagatcaacaagtggaccgacaacagagagctgacctacagcaacttccaccccctgctggtgagcggcagactgagaatccccgagaacttcttcgaggaggagagcagataccactgcgccctgatcctgaacctgcagaagagccccttcaccggcacctggaacttcaccagctgcagcgagagacacttcgtgagcctgtgccagaagtacagcgaggtgaagagcagacagaccctgcagaacgccagcgagaccgtgaagtacctgaacaacctgtacaagatcatccccaagaccctgacctggcacagcgccaagagagagtgcctgaagagcaacatgcagctggtgagcatcaccgacccctaccagcaggccttcctgagcgtgcaggccctgctgcacaacagcagcctgtggatcggcctgttcagccaggacgacgagctgaacttcggctggagcgacggcaagagactgcacttcagcagatgggccgagaccaacggccagctggaggactgcgtggtgctggacaccgacggcttctggaagaccgtggactgcaacgacaaccagcccggcgccatctgctactacagcggcaacgagaccgagaaggaggtgaagcccgtggacagcgtgaagtgccccagccccgtgctgaacaccccctggatccccttccagaactgctgctacaacttcatcatcaccaagaacagacacatggccaccacccaggacgaggtgcacaccaagtgccagaagctgaaccccaagagccacatcctgagcatcagagacgagaaggagaacaacttcgtgctggagcagctgctgtacttcaactacatggccagctgggtgatgctgggcatcacctacagaaacaagagcctgatgtggttcgacaagacccccctgagctacacccactggagagccggcagacccaccatcaagaacgagaagttcctggccggcctgagcaccgacggcttctgggacatccagaccttcaaggtgatcgaggaggccgtgtacttccaccagcacagcatcctggcctgcaagatcgagatggtggactacaaggaggagtacaacaccaccctgccccagttcatgccctacgaggacggcatctacagcgtgatccagaagaaggtgacctggtacgaggccctgaacatgtgcagccagagcggcggccacctggccagcgtgcacaaccagaacggccagctgttcctggaggacatcgtgaagagagacggcttccccctgtgggtgggcctgagcagccacgacggcagcgagagcagcttcgagtggagcgacggcagcaccttcgactacatcccctggaagggccagaccagccccggcaactgcgtgctgctggaccccaagggcacctggaagcacgagaagtgcaacagcgtgaaggacggcgccatctgctacaagcccaccaagagcaagaagctgagcagactgacctacagcagcagatgccccgccgccaaggagaacggcagcagatggatccagtacaagggccactgctacaagagcgaccaggccctgcacagcttcagcgaggccaagaagctgtgcagcaagcacgaccacagcgccaccatcgtgagcatcaaggacgaggacgagaacaagttcgtgagcagactgatgagagagaacaacaacatcaccatgagagtgtggctgggcctgagccagcacagcgtggaccagagctggagctggctggacggcagcgaggtgaccttcgtgaagtgggagaacaagagcaagagcggcgtgggcagatgcagcatgctgatcgccagcaacgagacctggaagaaggtggagtgcgagcacggcttcggcagagtggtgtgcaaggtgcccctgggccccgactacaccgccatcgccatcatcgtggccaccctgagcatcctggtgctgatgggcggcctgatctggttcctgttccagagacacagactgcacctggccggcttcagcagcgtgagatacgcccagggcgtgaacgaggacgagatcatgctgcccagcttccacgactag

SEQ ID NO: 228 - DNA, 5454 bp, Artificial Sequence
  Description of Artificial Sequence: Synthetic Transcript Sequence
atgagaaccggctgggccacccccagaagacccgccggcctgctgatgctgctgttctggttcttcgacctggccgagcccagcggcagagccgccaacgaccccttcaccatcgtgcacggcaacaccggcaagtgcatcaagcccgtgtacggctggatcgtggccgacgactgcgacgagaccgaggacaagctgtggaagtgggtgagccagcacagactgttccacctgcacagccagaagtgcctgggcctggacatcaccaagagcgtgaacgagctgagaatgttcagctgcgacagcagcgccatgctgtggtggaagtgcgagcaccacagcctgtacggcgccgccagatacagactggccctgaaggacggccacggcaccgccatcagcaacgccagcgacgtgtggaagaagggcggcagcgaggagagcctgtgcgaccagccctaccacgagatctacaccagagacggcaacagctacggcagaccctgcgagttccccttcctgatcgacggcacctggcaccacgactgcatcctggacgaggaccacagcggcccctggtgcgccaccaccctgaactacgagtacgacagaaagtggggcatctgcctgaagcccgagaacggctgcgaggacaactgggagaagaacgagcagttcggcagctgctaccagttcaacacccagaccgccctgagctggaaggaggcctacgtgagctgccagaaccagggcgccgacctgctgagcatcaacagcgccgccgagctgacctacctgaaggagaaggagggcatcgccaagatcttctggatcggcctgaaccagctgtacagcgccagaggctgggagtggagcgaccacaagcccctgaacttcctgaactgggaccccgacagacccagcgcccccaccatcggcggcagcagctgcgccagaatggacgccgagagcggcctgtggcagagcttcagctgcgaggcccagctgccctacgtgtgcagaaagcccctgaacaacaccgtggagctgaccgacgtgtggacctacagcgacaccagatgcgacgccggctggctgcccaacaacggcttctgctacctgctggtgaacgagagcaacagctgggacaaggcccacgccaagtgcaaggccttcagcagcgacctgatcagcatccacagcctggccgacgtggaggtggtggtgaccaagctgcacaacgaggacatcaaggaggaggtgtggatcggcctgaagaacatcaacatccccaccctgttccagtggagcgacggcaccgaggtgaccctgacctactgggacgagaacgagcccaacgtgccctacaacaagacccccaactgcgtgagctacctgggcgagctgggccagtggaaggtgcagagctgcgaggagaagctgaagtacgtgtgcaagagaaagggcgagaagctgaacgacgccagcagcgacaagatgtgcccccccgacgagggctggaagagacacggcgagacctgctacaagatctacgaggacgaggtgcccttcggcaccaactgcaacctgaccatcaccagcagattcgagcaggagtacctgaacgacctgatgaagaagtacgacaagagcctgagaaagtacttctggaccggcctgagagacgtggacagctgcggcgagtacaactgggccaccgtgggcggcagaagaagagccgtgaccttcagcaactggaacttcctggagcccgccagccccggcggctgcgtggccatgagcaccggcaagagcgtgggcaagtgggaggtgaaggactgcagaagcttcaaggccctgagcatctgcaagaagatgagcggccccctgggccccgaggaggccagccccaagcccgacgacccctgccccgagggctggcagagcttccccgccagcctgagctgctacaaggtgttccacgccgagagaatcgtgagaaagagaaactgggaggaggccgagagattctgccaggccctgggcgcccacctgagcagcttcagccacgtggacgagatcaaggagttcctgcacttcctgaccgaccagttcagcggccagcactggctgtggatcggcctgaacaagagaagccccgacctgcagggcagctggcagtggagcgacagaacccccgtgagcaccatcatcatgcccaacgagttccagcaggactacgacatcagagactgcgccgccgtgaaggtgttccacagaccctggagaagaggctggcacttctacgacgacagagagttcatctacctgagacccttcgcctgcgacaccaagctggagtgggtgtgccagatccccaagggcagaacccccaagacccccgactggtacaaccccgacagagccggcatccacggcccccccctgatcatcgagggcagcgagtactggttcgtggccgacctgcacctgaactacgaggaggccgtgctgtactgcgccagcaaccacagcttcctggccaccatcaccagcttcgtgggcctgaaggccatcaagaacaagatcgccaacatcagcggcgacggccagaagtggtggatcagaatcagcgagtggcccatcgacgaccacttcacctacagcagatacccctggcacagattccccgtgaccttcggcgaggagtgcctgtacatgagcgccaagacctggctgatcgacctgggcaagcccaccgactgcagcaccaagctgcccttcatctgcgagaagtacaacgtgagcagcctggagaagtacagccccgacagcgccgccaaggtgcagtgcagcgagcagtggatccccttccagaacaagtgcttcctgaagatcaagcccgtgagcctgaccttcagccaggccagcgacacctgccacagctacggcggcaccctgcccagcgtgctgagccagatcgagcaggacttcatcaccagcctgctgcccgacatggaggccaccctgtggatcggcctgagatggaccgcctacgagaagatcaacaagtggaccgacaacagagagctgacctacagcaacttccaccccctgctggtgagcggcagactgagaatccccgagaacttcttcgaggaggagagcagataccactgcgccctgatcctgaacctgcagaagagccccttcaccggcacctggaacttcaccagctgcagcgagagacacttcgtgagcctgtgccagaagtacagcgaggtgaagagcagacagaccctgcagaacgccagcgagaccgtgaagtacctgaacaacctgtacaagatcatccccaagaccctgacctggcacagcgccaagagagagtgcctgaagagcaacatgcagctggtgagcatcaccgacccctaccagcaggccttcctgagcgtgcaggccctgctgcacaacagcagcctgtggatcggcctgttcagccaggacgacgagctgaacttcggctggagcgacggcaagagactgcacttcagcagatgggccgagaccaacggccagctggaggactgcgtggtgctggacaccgacggcttctggaagaccgtggactgcaacgacaaccagcccggcgccatctgctactacagcggcaacgagaccgagaaggaggtgaagcccgtggacagcgtgaagtgccccagccccgtgctgaacaccccctggatccccttccagaactgctgctacaacttcatcatcaccaagaacagacacatggccaccacccaggacgaggtgcacaccaagtgccagaagctgaaccccaagagccacatcctgagcatcagagacgagaaggagaacaacttcgtgctggagcagctgctgtacttcaactacatggccagctgggtgatgctgggcatcacctacagaaacaagagcctgatgtggttcgacaagacccccctgagctacacccactggagagccggcagacccaccatcaagaacgagaagttcctggccggcctgagcaccgacggcttctgggacatccagaccttcaaggtgatcgaggaggccgtgtacttccaccagcacagcatcctggcctgcaagatcgagatggtggactacaaggaggagtacaacaccaccctgccccagttcatgccctacgaggacggcatctacagcgtgatccagaagaaggtgacctggtacgaggccctgaacatgtgcagccagagcggcggccacctggccagcgtgcacaaccagaacggccagctgttcctggaggacatcgtgaagagagacggcttccccctgtgggtgggcctgagcagccacgacggcagcgagagcagcttcgagtggagcgacggcagcaccttcgactacatcccctggaagggccagaccagccccggcaactgcgtgctgctggaccccaagggcacctggaagcacgagaagtgcaacagcgtgaaggacggcgccatctgctacaagcccaccaagagcaagaagctgagcagactgacctacagcagcagatgccccgccgccaaggagaacggcagcagatggatccagtacaagggccactgctacaagagcgaccaggccctgcacagcttcagcgaggccaagaagctgtgcagcaagcacgaccacagcgccaccatcgtgagcatcaaggacgaggacgagaacaagttcgtgagcagactgatgagagagaacaacaacatcaccatgagagtgtggctgggcctgagccagcacagcgtggactgccccagcagcacctggatccagttccaggacagctgctacatcttcctgcaggaggccatcaaggtggagagcatcgaggacgtgagaaaccagtgcaccgaccacggcgccgacatgatcagcatccacaacgaggaggagaacgccttcatcctggacaccctgaagaagcagtggaagggccccgacgacatcctgctgggcatgttctacgacaccgacgacgccagcttcaagtggttcgacaacagcaacatgaccttcgacaagtggaccgaccaggacgacgacgaggacctggtggacacctgcgccttcctgcacatcaagaccggcgagtggaagaagggcaactgcgaggtgagcagcgtggagggcaccctgtgcaagaccgccatcccctacaagagaaagtacctgagcgacaaccacatcctgatcagcgccctggtgatcgccagcaccgtgatcctgaccgtgctgggcgccatcatctggttcctgtacaagaagcacagcgacagcagattcaccaccgtgttcagcaccgccccccagagcccctacaacgaggactgcgtgctggtggtgggcgaggagaacgagtaccccgtgcagttcgactag

SEQ ID NO: 229 - DNA, 5622 bp, Artificial Sequence
  Description of Artificial Sequence: Synthetic Transcript Sequence
atgagaaccggctgggccacccccagaagacccgccggcctgctgatgctgctgttctggttcttcgacctggccgagcccagcggcagagccgccaacgaccccttcaccatcgtgcacggcaacaccggcaagtgcatcaagcccgtgtacggctggatcgtggccgacgactgcgacgagaccgaggacaagctgtggaagtgggtgagccagcacagactgttccacctgcacagccagaagtgcctgggcctggacatcaccaagagcgtgaacgagctgagaatgttcagctgcgacagcagcgccatgctgtggtggaagtgcgagcaccacagcctgtacggcgccgccagatacagactggccctgaaggacggccacggcaccgccatcagcaacgccagcgacgtgtggaagaagggcggcagcgaggagagcctgtgcgaccagccctaccacgagatctacaccagagacggcaacagctacggcagaccctgcgagttccccttcctgatcgacggcacctggcaccacgactgcatcctggacgaggaccacagcggcccctggtgcgccaccaccctgaactacgagtacgacagaaagtggggcatctgcctgaagcccgagaacggctgcgaggacaactgggagaagaacgagcagttcggcagctgctaccagttcaacacccagaccgccctgagctggaaggaggcctacgtgagctgccagaaccagggcgccgacctgctgagcatcaacagcgccgccgagctgacctacctgaaggagaaggagggcatcgccaagatcttctggatcggcctgaaccagctgtacagcgccagaggctgggagtggagcgaccacaagcccctgaacttcctgaactgggaccccgacagacccagcgcccccaccatcggcggcagcagctgcgccagaatggacgccgagagcggcctgtggcagagcttcagctgcgaggcccagctgccctacgtgtgcagaaagcccctgaacaacaccgtggagctgaccgacgtgtggacctacagcgacaccagatgcgacgccggctggctgcccaacaacggcttctgctacctgctggtgaacgagagcaacagctgggacaaggcccacgccaagtgcaaggccttcagcagcgacctgatcagcatccacagcctggccgacgtggaggtggtggtgaccaagctgcacaacgaggacatcaaggaggaggtgtggatcggcctgaagaacatcaacatccccaccctgttccagtggagcgacggcaccgaggtgaccctgacctactgggacgagaacgagcccaacgtgccctacaacaagacccccaactgcgtgagctacctgggcgagctgggccagtggaaggtgcagagctgcgaggagaagctgaagtacgtgtgcaagagaaagggcgagaagctgaacgacgccagcagcgacaagatgtgcccccccgacgagggctggaagagacacggcgagacctgctacaagatctacgaggacgaggtgcccttcggcaccaactgcaacctgaccatcaccagcagattcgagcaggagtacctgaacgacctgatgaagaagtacgacaagagcctgagaaagtacttctggaccggcctgagagacgtggacagctgcggcgagtacaactgggccaccgtgggcggcagaagaagagccgtgaccttcagcaactggaacttcctggagcccgccagccccggcggctgcgtggccatgagcaccggcaagagcgtgggcaagtgggaggtgaaggactgcagaagcttcaaggccctgagcatctgcaagaagatgagcggccccctgggccccgaggaggccagccccaagcccgacgacccctgccccgagggctggcagagcttccccgccagcctgagctgctacaaggtgttccacgccgagagaatcgtgagaaagagaaactgggaggaggccgagagattctgccaggccctgggcgcccacctgagcagcttcagccacgtggacgagatcaaggagttcctgcacttcctgaccgaccagttcagcggccagcactggctgtggatcggcctgaacaagagaagccccgacctgcagggcagctggcagtggagcgacagaacccccgtgagcaccatcatcatgcccaacgagttccagcaggactacgacatcagagactgcgccgccgtgaaggtgttccacagaccctggagaagaggctggcacttctacgacgacagagagttcatctacctgagacccttcgcctgcgacaccaagctggagtgggtgtgccagatccccaagggcagaacccccaagacccccgactggtacaaccccgacagagccggcatccacggcccccccctgatcatcgagggcagcgagtactggttcgtggccgacctgcacctgaactacgaggaggccgtgctgtactgcgccagcaaccacagcttcctggccaccatcaccagcttcgtgggcctgaaggccatcaagaacaagatcgccaacatcagcggcgacggccagaagtggtggatcagaatcagcgagtggcccatcgacgaccacttcacctacagcagatacccctggcacagattccccgtgaccttcggcgaggagtgcctgtacatgagcgccaagacctggctgatcgacctgggcaagcccaccgactgcagcaccaagctgcccttcatctgcgagaagtacaacgtgagcagcctggagaagtacagccccgacagcgccgccaaggtgcagtgcagcgagcagtggatccccttccagaacaagtgcttcctgaagatcaagcccgtgagcctgaccttcagccaggccagcgacacctgccacagctacggcggcaccctgcccagcgtgctgagccagatcgagcaggacttcatcaccagcctgctgcccgacatggaggccaccctgtggatcggcctgagatggaccgcctacgagaagatcaacaagtggaccgacaacagagagctgacctacagcaacttccaccccctgctggtgagcggcagactgagaatccccgagaacttcttcgaggaggagagcagataccactgcgccctgatcctgaacctgcagaagagccccttcaccggcacctggaacttcaccagctgcagcgagagacacttcgtgagcctgtgccagaagtacagcgaggtgaagagcagacagaccctgcagaacgccagcgagaccgtgaagtacctgaacaacctgtacaagatcatccccaagaccctgacctggcacagcgccaagagagagtgcctgaagagcaacatgcagctggtgagcatcaccgacccctaccagcaggccttcctgagcgtgcaggccctgctgcacaacagcagcctgtggatcggcctgttcagccaggacgacgagctgaacttcggctggagcgacggcaagagactgcacttcagcagatgggccgagaccaacggccagctggaggactgcgtggtgctggacaccgacggcttctggaagaccgtggactgcaacgacaaccagcccggcgccatctgctactacagcggcaacgagaccgagaaggaggtgaagcccgtggacagcgtgaagtgccccagccccgtgctgaacaccccctggatccccttccagaactgctgctacaacttcatcatcaccaagaacagacacatggccaccacccaggacgaggtgcacaccaagtgccagaagctgaaccccaagagccacatcctgagcatcagagacgagaaggagaacaacttcgtgctggagcagctgctgtacttcaactacatggccagctgggtgatgctgggcatcacctacagaaacaagagcctgatgtggttcgacaagacccccctgagctacacccactggagagccggcagacccaccatcaagaacgagaagttcctggccggcctgagcaccgacggcttctgggacatccagaccttcaaggtgatcgaggaggccgtgtacttccaccagcacagcatcctggcctgcaagatcgagatggtggactacaaggaggagtacaacaccaccctgccccagttcatgccctacgaggacggcatctacagcgtgatccagaagaaggtgacctggtacgaggccctgaacatgtgcagccagagcggcggccacctggccagcgtgcacaaccagaacggccagctgttcctggaggacatcgtgaagagagacggcttccccctgtgggtgggcctgagcagccacgacggcagcgagagcagcttcgagtggagcgacggcagcaccttcgactacatcccctggaagggccagaccagccccggcaactgcgtgctgctggaccccaagggcacctggaagcacgagaagtgcaacagcgtgaaggacggcgccatctgctacaagcccaccaagagcaagaagctgagcagactgacctacagcagcagatgccccgccgccaaggagaacggcagcagatggatccagtacaagggccactgctacaagagcgaccaggccctgcacagcttcagcgaggccaagaagctgtgcagcaagcacgaccacagcgccaccatcgtgagcatcaaggacgaggacgagaacaagttcgtgagcagactgatgagagagaacaacaacatcaccatgagagtgtggctgggcctgagccagcacagcgtggaccagagctggagctggctggacggcagcgaggtgaccttcgtgaagtgggagaacaagagcaagagcggcgtgggcagatgcagcatgctgatcgccagcaacgagacctggaagaaggtggagtgcgagcacggcttcggcagagtggtgtgcaaggtgcccctggactgccccagcagcacctggatccagttccaggacagctgctacatcttcctgcaggaggccatcaaggtggagagcatcgaggacgtgagaaaccagtgcaccgaccacggcgccgacatgatcagcatccacaacgaggaggagaacgccttcatcctggacaccctgaagaagcagtggaagggccccgacgacatcctgctgggcatgttctacgacaccgacgacgccagcttcaagtggttcgacaacagcaacatgaccttcgacaagtggaccgaccaggacgacgacgaggacctggtggacacctgcgccttcctgcacatcaagaccggcgagtggaagaagggcaactgcgaggtgagcagcgtggagggcaccctgtgcaagaccgccatcccctacaagagaaagtacctgagcgacaaccacatcctgatcagcgccctggtgatcgccagcaccgtgatcctgaccgtgctgggcgccatcatctggttcctgtacaagaagcacagcgacagcagattcaccaccgtgttcagcaccgccccccagagcccctacaacgaggactgcgtgctggtggtgggcgaggagaacgagtaccccgtgcagttcgactag

SEQ ID NO: 230 - DNA, 186 bp, Artificial Sequence
  Description of Artificial Sequence: Synthetic Transcript Sequence
atgaagagattcctgttcctgctgctgaccatcagcctgctggtgatggtgcagatccagaccggcctgagcggccagaacgacaccagccagaccagcagccccagcgccagcagcaacatcagcggcggcatcttcctgttcttcgtggccaacgccatcatccacctgttctgcttcagctag

SEQ ID NO: 231 - DNA, 1062 bp, Artificial Sequence
  Description of Artificial Sequence: Synthetic Transcript Sequence
atggagctgaccgagctgctgctggtggtgatgctgctgctgaccgccagactgaccctgagcagccccgccccccccgcctgcgacctgagagtgctgagcaagctgctgagagacagccacgtgctgcacagcagactgagccagtgccccgaggtgcaccccctgcccacccccgtgctgctgcccgccgtggacttcagcctgggcgagtggaagacccagatggaggagaccaaggcccaggacatcctgggcgccgtgaccctgctgctggagggcgtgatggccgccagaggccagctgggccccacctgcctgagcagcctgctgggccagctgagcggccaggtgagactgctgctgggcgccctgcagagcctgctgggcacccagctgcccccccagggcagaaccaccgcccacaaggaccccaacgccatcttcctgagcttccagcacctgctgagaggcaaggtgagattcctgatgctggtgggcggcagcaccctgtgcgtgagaagagccccccccaccaccgccgtgcccagcagaaccagcctggtgctgaccctgaacgagctgcccaacagaaccagcggcctgctggagaccaacttcaccgccagcgccagaaccaccggcagcggcctgctgaagtggcagcagggcttcagagccaagatccccggcctgctgaaccagaccagcagaagcctggaccagatccccggctacctgaacagaatccacgagctgctgaacggcaccagaggcctgttccccggccccagcagaagaaccctgggcgcccccgacatcagcagcggcaccagcgacaccggcagcctgccccccaacctgcagcccggctacagccccagccccacccacccccccaccggccagtacaccctgttccccctgccccccaccctgcccacccccgtggtgcagctgcaccccctgctgcccgaccccagcgcccccacccccacccccaccagccccctgctgaacaccagctacacccacagccagaacctgagccaggagggctag

SEQ ID NO: 232 - DNA, 537 bp, Artificial Sequence
  Description of Artificial Sequence: Synthetic Transcript Sequence
atgaccgtgctggcccccgcctggagccccaccacctacctgctgctgctgctgctgctgagcagcggcctgagcggcacccaggactgcagcttccagcacagccccatcagcagcgacttcgccgtgaagatcagagagctgagcgactacctgctgcaggactaccccgtgaccgtggccagcaacctgcaggacgaggagctgtgcggcggcctgtggagactggtgctggcccagagatggatggagagactgaagaccgtggccggcagcaagatgcagggcctgctggagagagtgaacaccgagatccacttcgtgaccaagtgcgccttccagcccccccccagctgcctgagattcgtgcagaccaacatcagcagactgctgcaggagaccagcgagcagctggtggccctgaagccctggatcaccagacagaacttcagcagatgcctggagctgcagtgccagcccgtggagaccgtgttccacagagtgagccaggacggcctggacctgctgaccagctag

SEQ ID NO: 233 - DNA, 708 bp, Artificial Sequence
  Description of Artificial Sequence: Synthetic Transcript Sequence
atgaccgtgctggcccccgcctggagccccaccacctacctgctgctgctgctgctgctgagcagcggcctgagcggcacccaggactgcagcttccagcacagccccatcagcagcgacttcgccgtgaagatcagagagctgagcgactacctgctgcaggactaccccgtgaccgtggccagcaacctgcaggacgaggagctgtgcggcggcctgtggagactggtgctggcccagagatggatggagagactgaagaccgtggccggcagcaagatgcagggcctgctggagagagtgaacaccgagatccacttcgtgaccaagtgcgccttccagcccccccccagctgcctgagattcgtgcagaccaacatcagcagactgctgcaggagaccagcgagcagctggtggccctgaagccctggatcaccagacagaacttcagcagatgcctggagctgcagtgccagcccgacagcagcaccctgccccccccctggagccccagacccctggaggccaccgcccccaccgccccccagccccccctgctgctgctgctgctgctgcccgtgggcctgctgctgctggccgccgcctggtgcctgcactggcagagaaccagaagaagaacccccagacccggcgagcaggtgccccccgtgcccagcccccaggacctgctgctggtggagcactag

SEQ ID NO: 234 - DNA, 1110 bp, Artificial Sequence
  Description of Artificial Sequence: Synthetic Transcript Sequence
atggtgtgggcccccctgggcccccccagaaccgactgcctgaccctgctgcacacccccagcaaggacagccccaagatgagcctggagtggctggtggcctggagctggagcctggacggcctgagagactgcatcgccaccggcatccagagcgtgagagactgcgacaccaccgccgtgatcaccgtggcctgcctgctggtgctgttcgtgtggtactgctaccacgtgggcagagagcagcccagaccctacgtgagcgtgaacagcctgatgcaggccgccgacgccaacggcctgcagaacggctacgtgtactgccagagccccgagtgcgtgagatgcacccacaacgagggcctgaaccagaagctgtaccacaacctgcaggagtacgccaagagatacagctggagcggcatgggcagaatccacaagggcatcagagagcagggcagatacctgaacagcagacccagcatccagaagcccgaggtgttcttcctgcccgacctgcccaccaccccctacttcagcagagacgcccagaagcacgacgtggaggtgctggagagaaacttccagaccatcctgtgcgagttcgagaccctgtacaaggccttcagcaactgcagcctgccccagggctggaagatgaacagcacccccagcggcgagtggttcaccttctacctggtgaaccagggcgtgtgcgtgcccagaaactgcagaaagtgccccagaacctacagactgctgggcagcctgagaacctgcatcggcaacaacgtgttcggcaacgcctgcatcagcgtgctgagccccggcaccgtgatcaccgagcactacggccccaccaacatcagaatcagatgccacctgggcctgaagacccccaacggctgcgagctggtggtgggcggcgagccccagtgctgggccgagggcagatgcctgctgttcgacgacagcttcctgcacgccgccttccacgagggcagcgccgaggacggccccagagtggtgttcatggtggacctgtggcaccccaacgtggccgccgccgagagacaggccctggacttcatcttcgcccccggcagatag

SEQ ID NO: 235 - DNA, 1989 bp, Artificial Sequence
  Description of Artificial Sequence: Synthetic Transcript Sequence
atgagaccccagatcctgctgctgctggccctgctgaccctgggcctggccgcccagcaccaggacaaggtgccctgcaagatggtggacaagaaggtgagctgccaggtgctgggcctgctgcaggtgcccagcgtgctgccccccgacaccgagaccctggacctgagcggcaaccagctgagaagcatcctggccagccccctgggcttctacaccgccctgagacacctggacctgagcaccaacgagatcagcttcctgcagcccggcgccttccaggccctgacccacctggagcacctgagcctggcccacaacagactggccatggccaccgccctgagcgccggcggcctgggccccctgcccagagtgaccagcctggacctgagcggcaacagcctgtacagcggcctgctggagagactgctgggcgaggcccccagcctgcacaccctgagcctggccgagaacagcctgaccagactgaccagacacaccttcagagacatgcccgccctggagcagctggacctgcacagcaacgtgctgatggacatcgaggacggcgccttcgagggcctgcccagactgacccacctgaacctgagcagaaacagcctgacctgcatcagcgacttcagcctgcagcagctgagagtgctggacctgagctgcaacagcatcgaggccttccagaccgccagccagccccaggccgagttccagctgacctggctggacctgagagagaacaagctgctgcacttccccgacctggccgccctgcccagactgatctacctgaacctgagcaacaacctgatcagactgcccaccggccccccccaggacagcaagggcatccacgcccccagcgagggctggagcgccctgcccctgagcgcccccagcggcaacgccagcggcagacccctgagccagctgctgaacctggacctgagctacaacgagatcgagctgatccccgacagcttcctggagcacctgaccagcctgtgcttcctgaacctgagcagaaactgcctgagaaccttcgaggccagaagactgggcagcctgccctgcctgatgctgctggacctgagccacaacgccctggagaccctggagctgggcgccagagccctgggcagcctgagaaccctgctgctgcagggcaacgccctgagagacctgcccccctacaccttcgccaacctggccagcctgcagagactgaacctgcagggcaacagagtgagcccctgcggcggccccgacgagcccggccccagcggctgcgtggccttcagcggcatcaccagcctgagaagcctgagcctggtggacaacgagatcgagctgctgagagccggcgccttcctgcacacccccctgaccgagctggacctgagcagcaaccccggcctggaggtggccaccggcgccctgggcggcctggaggccagcctggaggtgctggccctgcagggcaacggcctgatggtgctgcaggtggacctgccctgcttcatctgcctgaagagactgaacctggccgagaacagactgagccacctgcccgcctggacccaggccgtgagcctggaggtgctggacctgagaaacaacagcttcagcctgctgcccggcagcgccatgggcggcctggagaccagcctgagaagactgtacctgcagggcaaccccctgagctgctgcggcaacggctggctggccgcccagctgcaccagggcagagtggacgtggacgccacccaggacctgatctgcagattcagcagccaggaggaggtgagcctgagccacgtgagacccgaggactgcgagaagggcggcctgaagaacatcaacctgatcatcatcctgaccttcatcctggtgagcgccatcctgctgaccaccctggccgcctgctgctgcgtgagaagacagaagttcaaccagcagtacaaggcctag

SEQ ID NO: 236 - DNA, 1989 bp, Artificial Sequence; identical to SEQ ID NO: 235
  Description of Artificial Sequence: Synthetic Transcript Sequence

SEQ ID NO: 237 - DNA, 1989 bp, Artificial Sequence; identical to SEQ ID NO: 235
  Description of Artificial Sequence: Synthetic Transcript Sequence

SEQ ID NO: 238 - DNA, 561 bp, Artificial Sequence
  Description of Artificial Sequence: Synthetic Transcript Sequence
atgagaccccagatcctgctgctgctggccctgctgaccctgggcctggccgcccagcaccaggacaaggtgccctgcaagatggtggacaagaaggtgagctgccaggtgctgggcctgctgcaggtgcccagcgtgctgccccccgacaccgagaccctggacctgagcggcaaccagctgagaagcatcctggccagccccctgggcttctacaccgccctgagacacctggacctgagcaccaacgagatcagcttcctgcagcccggcgccttccaggccctgacccacctggagcacctgagcctggcccacaacagactggccatggccaccgccctgagcgccggcggcctgggccccctgcccagagtgaccagcctggacctgagcggcaacagcctgtacagcggcctgctggagagactgctgggcgaggcccccagcctgcacaccctgagcctggccgagaacagcctgaccagactgaccagacacaccttcagagacatgcccgccctggagcagctggacctgcacagcaacgtgctgatgtag

SEQ ID NO: 239 - DNA, 1212 bp, Artificial Sequence
  Description of Artificial Sequence: Synthetic Transcript Sequence
atggcccacgccatggagaacagctggaccatcagcaaggagtaccacatcgacgaggaggtgggcttcgccctgcccaacccccaggagaacctgcccgacttctacaacgactggatgttcatcgccaagcacctgcccgacctgatcgagagcggccagctgagagagagagtggagaagctgaacatgctgagcatcgaccacctgaccgaccacaagagccagagactggccagactggtgctgggctgcatcaccatggcctacgtgtggggcaagggccacggcgacgtgagaaaggtgctgcccagaaacatcgccgtgccctactgccagctgagcaagaagctggagctgccccccatcctggtgtacgccgactgcgtgctggccaactggaagaagaaggaccccaacaagcccctgacctacgagaacatggacgtgctgttcagcttcagagacggcgactgcagcaagggcttcttcctggtgagcctgctggtggagatcgccgccgccagcgccatcaaggtgatccccaccgtgttcaaggccatgcagatgcaggagagagacaccctgctgaaggccctgctggagatcgccagctgcctggagaaggccctgcaggtgttccaccagatccacgaccacgtgaaccccaaggccttcttcagcgtgctgagaatctacctgagcggctggaagggcaacccccagctgagcgacggcctggtgtacgagggcttctgggaggaccccaaggagttcgccggcggcagcgccggccagagcagcgtgttccagtgcttcgacgtgctgctgggcatccagcagaccgccggcggcggccacgccgcccagttcctgcaggacatgagaagatacatgccccccgcccacagaaacttcctgtgcagcctggagagcaaccccagcgtgagagagttcgtgctgagcaagggcgacgccggcctgagagaggcctacgacgcctgcgtgaaggccctggtgagcctgagaagctaccacctgcagatcgtgaccaagtacatcctgatccccgccagccagcagcccaaggagaacaagaccagcgaggaccccagcaagctggaggccaagggcaccggcggcaccgacctgatgaacttcctgaagaccgtgagaagcaccaccgagaagagcctgctgaaggagggctag

SEQ ID NO: 240 - DNA, 237 bp, Artificial Sequence
  Description of Artificial Sequence: Synthetic Transcript Sequence
atggcccacgccatggagaacagctggaccatcagcaaggagtaccacatcgacgaggaggtgggcttcgccctgcccaacccccaggagaacctgcccgacttctacaacgactggatgttcatcgccaagcacctgcccgacctgatcgagagcggccagctgagagagagagtggagaagctgaacatgctgagcatcgaccacctgaccgaccacaagagccagagactgtag

SEQ ID NO: 241 - DNA, 543 bp, Artificial Sequence
  Description of Artificial Sequence: Synthetic Transcript Sequence
atggcccacgccatggagaacagctggaccatcagcaaggagtaccacatcgacgaggaggtgggcttcgccctgcccaacccccaggagaacctgcccgacttctacaacgactggatgttcatcgccaagcacctgcccgacctgatcgagagcggccagctgagagagagagtggagaagctgaacatgctgagcatcgaccacctgaccgaccacaagagccagagactggccagactggtgctgggctgcatcaccatggcctacgtgtggggcaagggccacggcgacgtgagaaaggtgctgcccagaaacatcgccgtgccctactgccagctgagcaagaagctggagctgccccccatcctggtgtacgccgactgcgtgctggccaactggaagaagaaggaccccaacaagcccctgacctacgagaacatggacgtgctgttcagcttcagagacggcgactgcagcaagggcttcttcctggtgagcctgctggtggagatcgccgccgccagcgccatcaaggtgtag

SEQ ID NO: 242 - DNA, 1212 bp, Artificial Sequence; identical to SEQ ID NO: 239
  Description of Artificial Sequence: Synthetic Transcript Sequence

SEQ ID NO: 243 - DNA, 144 bp, Artificial Sequence
  Description of Artificial Sequence: Synthetic Transcript Sequence
atggcccacgccatggagaacagctggaccatcagcaaggagtaccacatcgacgaggaggtgggcttcgccctgcccaacccccaggagaacctgcccgacttctacaacgactggatgttcatcgccaagcacctgccctag

SEQ ID NO: 244 - DNA, 1224 bp, Artificial Sequence
  Description of Artificial Sequence: Synthetic Transcript Sequence
atggagccccacagacccaacgtgaagaccgccgtgcccctgagcctggagagctaccacatcagcgaggagtacggcttcctgctgcccgacagcctgaaggagctgcccgaccactacagaccctggatggagatcgccaacaagctgccccagctgatcgacgcccaccagctgcaggcccacgtggacaagatgcccctgctgagctgccagttcctgaagggccacagagagcagagactggcccacctggtgctgagcttcctgaccatgggctacgtgtggcaggagggcgaggcccagcccgccgaggtgctgcccagaaacctggccctgcccttcgtggaggtgagcagaaacctgggcctgccccccatcctggtgcacagcgacctggtgctgaccaactggaccaagaaggaccccgacggcttcctggagatcggcaacctggagaccatcatcagcttccccggcggcgagagcctgcacggcttcatcctggtgaccgccctggtggagaaggaggccgtgcccggcatcaaggccctggtgcaggccaccaacgccatcctgcagcccaaccaggaggccctgctgcaggccctgcagagactgagactgagcatccaggacatcaccaagaccctgggccagatgcacgactacgtggaccccgacatcttctacgccggcatcagaatcttcctgagcggctggaaggacaaccccgccatgcccgccggcctgatgtacgagggcgtgagccaggagcccctgaagtacagcggcggcagcgccgcccagagcaccgtgctgcacgccttcgacgagttcctgggcatcagacacagcaaggagagcggcgacttcctgtacagaatgagagactacatgccccccagccacaaggccttcatcgaggacatccacagcgcccccagcctgagagactacatcctgagcagcggccaggaccacctgctgaccgcctacaaccagtgcgtgcaggccctggccgagctgagaagctaccacatcaccatggtgaccaagtacctgatcaccgccgccgccaaggccaagcacggcaagcccaaccacctgcccggccccccccaggccctgaaggacagaggcaccggcggcaccgccgtgatgagcttcctgaagagcgtgagagacaagaccctggagagcatcctgcaccccagaggctag

SEQ ID NO: 245 - DNA, 1263 bp, Artificial Sequence
  Description of Artificial Sequence: Synthetic Transcript Sequence
atgctgcacttccactactacgacaccagcaacaagatcatggagccccacagacccaacgtgaagaccgccgtgcccctgagcctggagagctaccacatcagcgaggagtacggcttcctgctgcccgacagcctgaaggagctgcccgaccactacagaccctggatggagatcgccaacaagctgccccagctgatcgacgcccaccagctgcaggcccacgtggacaagatgcccctgctgagctgccagttcctgaagggccacagagagcagagactggcccacctggtgctgagcttcctgaccatgggctacgtgtggcaggagggcgaggcccagcccgccgaggtgctgcccagaaacctggccctgcccttcgtggaggtgagcagaaacctgggcctgccccccatcctggtgcacagcgacctggtgctgaccaactggaccaagaaggaccccgacggcttcctggagatcggcaacctggagaccatcatcagcttccccggcggcgagagcctgcacggcttcatcctggtgaccgccctggtggagaaggaggccgtgcccggcatcaaggccctggtgcaggccaccaacgccatcctgcagcccaaccaggaggccctgctgcaggccctgcagagactgagactgagcatccaggacatcaccaagaccctgggccagatgcacgactacgtggaccccgacatcttctacgccggcatcagaatcttcctgagcggctggaaggacaaccccgccatgcccgccggcctgatgtacgagggcgtgagccaggagcccctgaagtacagcggcggcagcgccgcccagagcaccgtgctgcacgccttcgacgagttcctgggcatcagacacagcaaggagagcggcgacttcctgtacagaatgagagactacatgccccccagccacaaggccttcatcgaggacatccacagcgcccccagcctgagagactacatcctgagcagcggccaggaccacctgctgaccgcctacaaccagtgcgtgcaggccctggccgagctgagaagctaccacatcaccatggtgaccaagtacctgatcaccgccgccgccaaggccaagcacggcaagcccaaccacctgcccggccccccccaggccctgaaggacagaggcaccggcggcaccgccgtgatgagcttcctgaagagcgtgagagacaagaccctggagagcatcctgcaccccagaggctag

SEQ ID NO: 246 - DNA, 537 bp, Artificial Sequence
  Description of Artificial Sequence: Synthetic Transcript Sequence
atgcacagcagcgccctgctgtgctgcctggtgctgctgaccggcgtgagagccagccccggccagggcacccagagcgagaacagctgcacccacttccccggcaacctgcccaacatgctgagagacctgagagacgccttcagcagagtgaagaccttcttccagatgaaggaccagctggacaacctgctgctgaaggagagcctgctggaggacttcaagggctacctgggctgccaggccctgagcgagatgatccagttctacctggaggaggtgatgccccaggccgagaaccaggaccccgacatcaaggcccacgtgaacagcctgggcgagaacctgaagaccctgagactgagactgagaagatgccacagattcctgccctgcgagaacaagagcaaggccgtggagcaggtgaagaacgccttcaacaagctgcaggagaagggcatctacaaggccatgagcgagttcgacatcttcatcaactacatcgaggcctacatgaccatgaagatcagaaactag

SEQ ID NO: 247 - DNA, 762 bp, Artificial Sequence
  Description of Artificial Sequence: Synthetic Transcript Sequence
atgtggccccccggcagcgccagccagcccccccccagccccgccgccgccaccggcctgcaccccgccgccagacccgtgagcctgcagtgcagactgagcatgtgccccgccagaagcctgctgctggtggccaccctggtgctgctggaccacctgagcctggccagaaacctgcccgtggccacccccgaccccggcatgttcccctgcctgcaccacagccagaacctgctgagagccgtgagcaacatgctgcagaaggccagacagaccctggagttctacccctgcaccagcgaggagatcgaccacgaggacatcaccaaggacaagaccagcaccgtggaggcctgcctgcccctggagctgaccaagaacgagagctgcctgaacagcagagagaccagcttcatcaccaacggcagctgcctggccagcagaaagaccagcttcatgatggccctgtgcctgagcagcatctacgaggacctgaagatgtaccaggtggagttcaagaccatgaacgccaagctgctgatggaccccaagagacagatcttcctggaccagaacatgctggccgtgatcgacgagctgatgcaggccctgaacttcaacagcgagaccgtgccccagaagagcagcctggaggagcccgacttctacaagaccaagatcaagctgtgcatcctgctgcacgccttcagaatcagagccgtgaccatcgacagagtgatgagctacctgaacgccagctag

SEQ ID NO: 248 - DNA, 720 bp, Artificial Sequence
  Description of Artificial Sequence: Synthetic Transcript Sequence
atgtggccccccggcagcgccagccagcccccccccagccccgccgccgccaccggcctgcaccccgccgccagacccgtgagcctgcagtgcagactgagcatgtgccccgccagaagcctgctgctggtggccaccctggtgctgctggaccacctgagcctggccagaaacctgcccgtggccacccccgaccccggcatgttcccctgcctgcaccacagccagaacctgctgagagccgtgagcaacatgctgcagaaggccagacagaccctggagttctacccctgcaccagcgaggagatcgaccacgaggacatcaccaaggacaagaccagcaccgtggaggcctgcctgcccctggagctgaccaagaacggcagctgcctggccagcagaaagaccagcttcatgatggccctgtgcctgagcagcatctacgaggacctgaagatgtaccaggtggagttcaagaccatgaacgccaagctgctgatggaccccaagagacagatcttcctggaccagaacatgctggccgtgatcgacgagctgatgcaggccctgaacttcaacagcgagaccgtgccccagaagagcagcctggaggagcccgacttctacaagaccaagatcaagctgtgcatcctgctgcacgccttcagaatcagagccgtgaccatcgacagagtgatgagctacctgaacgccagctag

SEQ ID NO: 249 - DNA, 648 bp, Artificial Sequence
  Description of Artificial Sequence: Synthetic Transcript Sequence
atgtggccccccggcagcgccagccagcccccccccagccccgccgccgccaccggcctgcaccccgccgccagacccgtgagcctgcagtgcagactgagcatgtgccccgccagaagcctgctgctggtggccaccctggtgctgctggaccacctgagcctggccagaaacctgcccgtggccacccccgaccccggcatgttcccctgcctgcaccacagccagaacctgctgagagccgtgagcaacatgctgcagaagaacgagagctgcctgaacagcagagagaccagcttcatcaccaacggcagctgcctggccagcagaaagaccagcttcatgatggccctgtgcctgagcagcatctacgaggacctgaagatgtaccaggtggagttcaagaccatgaacgccaagctgctgatggaccccaagagacagatcttcctggaccagaacatgctggccgtgatcgacgagctgatgcaggccctgaacttcaacagcgagaccgtgccccagaagagcagcctggaggagcccgacttctacaagaccaagatcaagctgtgcatcctgctgcacgccttcagaatcagagccgtgaccatcgacagagtgatgagctacctgaacgccagctag

SEQ ID NO: 250 - DNA, 429 bp, Artificial Sequence
  Description of Artificial Sequence: Synthetic Transcript Sequence
atgagcctgctgcccgtgccctacaccgaggccgccagcctgagcaccggcagcaccgtgaccatcaagggcagacccctggcctgcttcctgaacgagccctacctgcaggtggacttccacaccgagatgaaggaggagagcgacatcgtgttccacttccaggtgtgcttcggcagaagagtggtgatgaacagcagagagtacggcgcctggaagcagcaggtggagagcaagaacatgcccttccaggacggccaggagttcgagctgagcatcagcgtgctgcccgacaagtaccaggtgatggtgaacggccagagcagctacaccttcgaccacagaatcaagcccgaggccgtgaagatggtgcaggtgtggagagacatcagcctgaccaagttcaacgtgagctacctgaagagatag

SEQ ID NO: 251 - DNA, 657 bp, Artificial Sequence
  Description of Artificial Sequence: Synthetic Transcript Sequence
atgagcttcgtgggcgagaacagcggcgtgaagatgggcagcgaggactgggagaaggacgagccccagtgctgcctggaggaccccgccggcagccccctggagcccggccccagcctgcccaccatgaacttcgtgcacaccagccccaaggtgaagaacctgaaccccaagaagttcagcatccacgaccaggaccacaaggtgctggtgctggacagcggcaacctgatcgccgtgcccgacaagaactacatcagacccgagatcttcttcgccctggccagcagcctgagcagcgccagcgccgagaagggcagccccatcctgctgggcgtgagcaagggcgagttctgcctgtactgcgacaaggacaagggccagagccaccccagcctgcagctgaagaaggagaagctgatgaagctggccgcccagaaggagagcgccagaagacccttcatcttctacagagcccaggtgggcagctggaacatgctggagagcgccgcccaccccggctggttcatctgcaccagctgcaactgcaacgagcccgtgggcgtgaccgacaagttcgagaacagaaagcacatcgagttcagcttccagcccgtgtgcaaggccgagatgagccccagcgaggtgagcgactag

SEQ ID NO: 252 - DNA, 579 bp, Artificial Sequence
  Description of Artificial Sequence: Synthetic Transcript Sequence
atgagcggctgcgacagaagagagaccgagaccaagggcaagaacagcttcaagaagagactgagaggccccaaggtgaagaacctgaaccccaagaagttcagcatccacgaccaggaccacaaggtgctggtgctggacagcggcaacctgatcgccgtgcccgacaagaactacatcagacccgagatcttcttcgccctggccagcagcctgagcagcgccagcgccgagaagggcagccccatcctgctgggcgtgagcaagggcgagttctgcctgtactgcgacaaggacaagggccagagccaccccagcctgcagctgaagaaggagaagctgatgaagctggccgcccagaaggagagcgccagaagacccttcatcttctacagagcccaggtgggcagctggaacatgctggagagcgccgcccaccccggctggttcatctgcaccagctgcaactgcaacgagcccgtgggcgtgaccgacaagttcgagaacagaaagcacatcgagttcagcttccagcccgtgtgcaaggccgagatgagccccagcgaggtgagcgactag

SEQ ID NO: 253 - DNA, 474 bp, Artificial Sequence
  Description of Artificial Sequence: Synthetic Transcript Sequence
atgagcttcgtgggcgagaacagcggcgtgaagatgggcagcgaggactgggagaaggacgagccccagtgctgcctggaggagatcttcttcgccctggccagcagcctgagcagcgccagcgccgagaagggcagccccatcctgctgggcgtgagcaagggcgagttctgcctgtactgcgacaaggacaagggccagagccaccccagcctgcagctgaagaaggagaagctgatgaagctggccgcccagaaggagagcgccagaagacccttcatcttctacagagcccaggtgggcagctggaacatgctggagagcgccgcccaccccggctggttcatctgcaccagctgcaactgcaacgagcccgtgggcgtgaccgacaagttcgagaacagaaagcacatcgagttcagcttccagcccgtgtgcaaggccgagatgagccccagcgaggtgagcgactag

SEQ ID NO: 254 - DNA, 594 bp, Artificial Sequence
  Description of Artificial Sequence: Synthetic Transcript Sequence
atgagcttcgtgggcgagaacagcggcgtgaagatgggcagcgaggactgggagaaggacgagccccagtgctgcctggagggccccaaggtgaagaacctgaaccccaagaagttcagcatccacgaccaggaccacaaggtgctggtgctggacagcggcaacctgatcgccgtgcccgacaagaactacatcagacccgagatcttcttcgccctggccagcagcctgagcagcgccagcgccgagaagggcagccccatcctgctgggcgtgagcaagggcgagttctgcctgtactgcgacaaggacaagggccagagccaccccagcctgcagctgaagaaggagaagctgatgaagctggccgcccagaaggagagcgccagaagacccttcatcttctacagagcccaggtgggcagctggaacatgctggagagcgccgcccaccccggctggttcatctgcaccagctgcaactgcaacgagcccgtgggcgtgaccgacaagttcgagaacagaaagcacatcgagttcagcttccagcccgtgtgcaaggccgagatgagccccagcgaggtgagcgactag

SEQ ID NO: 255 - DNA, 537 bp, Artificial Sequence
  Description of Artificial Sequence: Synthetic Transcript Sequence
atgagcttcgtgggcgagaacagcggcgtgaagatgggcagcgaggactgggagaaggacgagccccagtgctgcctggaggaccccgccggcagccccctggagcccggccccagcctgcccaccatgaacttcgtgcacaccaagatcttcttcgccctggccagcagcctgagcagcgccagcgccgagaagggcagccccatcctgctgggcgtgagcaagggcgagttctgcctgtactgcgacaaggacaagggccagagccaccccagcctgcagctgaagaaggagaagctgatgaagctggccgcccagaaggagagcgccagaagacccttcatcttctacagagcccaggtgggcagctggaacatgctggagagcgccgcccaccccggctggttcatctgcaccagctgcaactgcaacgagcccgtgggcgtgaccgacaagttcgagaacagaaagcacatcgagttcagcttccagcccgtgtgcaaggccgagatgagccccagcgaggtgagcgactag

SEQ ID NO: 256 - DNA, 1344 bp, Artificial Sequence
  Description of Artificial Sequence: Synthetic Transcript Sequence
atgatccccaccttcaccgccctgctgtgcctgggcctgagcctgggccccagaacccacatgcaggccggccccctgcccaagcccaccctgtgggccgagcccggcagcgtgatcagctggggcaacagcgtgaccatctggtgccagggcaccctggaggccagagagtacagactggacaaggaggagagccccgccccctgggacagacagaaccccctggagcccaagaacaaggccagattcagcatccccagcatgaccgaggactacgccggcagatacagatgctactacagaagccccgtgggctggagccagcccagcgaccccctggagctggtgatgaccggcgcctacagcaagcccaccctgagcgccctgcccagccccctggtgaccagcggcaagagcgtgaccctgctgtgccagagcagaagccccatggacaccttcctgctgatcaaggagagagccgcccaccccctgctgcacctgagaagcgagcacggcgcccagcagcaccaggccgagttccccatgagccccgtgaccagcgtgcacggcggcacctacagatgcttcagcagccacggcttcagccactacctgctgagccaccccagcgaccccctggagctgatcgtgagcggcagcctggaggaccccagacccagccccaccagaagcgtgagcaccgccgccggccccgaggaccagcccctgatgcccaccggcagcgtgccccacagcggcctgagaagacactgggaggtgctgatcggcgtgctggtggtgagcatcctgctgctgagcctgctgctgttcctgctgctgcagcactggagacagggcaagcacagaaccctggcccagagacaggccgacttccagagaccccccggcgccgccgagcccgagcccaaggacggcggcctgcagagaagaagcagccccgccgccgacgtgcagggcgagaacttctgcgccgccgtgaagaacacccagcccgaggacggcgtggagatggacaccagaagcccccacgacgaggacccccaggccgtgacctacgccaaggtgaagcacagcagacccagaagagagatggccagcccccccagccccctgagcggcgagttcctggacaccaaggacagacaggccgaggaggacagacagatggacaccgaggccgccgccagcgaggccccccaggacgtgacctacgcccagctgcacagcttcaccctgagacagaaggccaccgagcccccccccagccaggagggcgccagccccgccgagcccagcgtgtacgccaccctggccatccactag

SEQ ID NO: 257 - DNA, 636 bp, Artificial Sequence
  Description of Artificial Sequence: Synthetic Transcript Sequence
atggtggcccacaaccaggtggccgccgacaacgccgtgagcaccgccgccgagcccagaagaagacccgagcccagcagcagcagcagcagcagccccgccgcccccgccagacccagaccctgccccgccgtgcccgcccccgcccccggcgacacccacttcagaaccttcagaagccacgccgactacagaagaatcaccagagccagcgccctgctggacgcctgcggcttctactggggccccctgagcgtgcacggcgcccacgagagactgagagccgagcccgtgggcaccttcctggtgagagacagcagacagagaaactgcttcttcgccctgagcgtgaagatggccagcggccccaccagcatcagagtgcacttccaggccggcagattccacctggacggcagcagagagagcttcgactgcctgttcgagctgctggagcactacgtggccgcccccagaagaatgctgggcgcccccctgagacagagaagagtgagacccctgcaggagctgtgcagacagagaatcgtggccaccgtgggcagagagaacctggccagaatccccctgaaccccgtgctgagagactacctgagcagcttccccttccagatctag

SEQ ID NO: 258 - DNA, 1596 bp, Artificial Sequence
  Description of Artificial Sequence: Synthetic Transcript Sequence
atggccgccaccctggacctgaagagcaaggaggagaaggacgccgagctggacaagagaatcgaggccctgagaagaaagaacgaggccctgatcagaagataccaggagatcgaggaggacagaaagaaggccgagctggagggcgtggccgtgaccgcccccagaaagggcagaagcgtggagaaggagaacgtggccgtggagagcgagaagaacctgggccccagcagaagaagccccggcacccccagaccccccggcgccagcaagggcggcagaacccccccccagcagggcggcagagccggcatgggcagagccagcagaagctgggagggcagccccggcgagcagcccagaggcggcggcgccggcggcagaggcagaagaggcagaggcagaggcagcccccacctgagcggcgccggcgacaccagcatcagcgacagaaagagcaaggagtgggaggagagaagaagacagaacatcgagaagatgaacgaggagatggagaagatcgccgagtacgagagaaaccagagagagggcgtgctggagcccaaccccgtgagaaacttcctggacgaccccagaagaagaagcggccccctggaggagagcgagagagacagaagagaggagagcagaagacacggcagaaactggggcggccccgacttcgagagagtgagatgcggcctggagcacgagagacagggcagaagagccggcctgggcagcgccggcgacatgaccctgagcatgaccggcagagagagaagcgagtacctgagatggaagcaggagagagagaagatcgaccaggagagactgcagagacacagaaagcccaccggccagtggagaagagagtgggacgccgagaagaccgacggcatgttcaaggacggccccgtgcccgcccacgagcccagccacagatacgacgaccaggcctgggccagaccccccaagccccccaccttcggcgagttcctgagccagcacaaggccgaggccagcagcagaagaagaagaaagagcagcagaccccaggccaaggccgcccccagagcctacagcgaccacgacgacagatgggagaccaaggagggcgccgccagccccgcccccgagaccccccagcccaccagccccgagaccagccccaaggagacccccatgcagccccccgagatccccgcccccgcccacagaccccccgaggacgagggcgaggagaacgagggcgaggaggacgaggagtgggaggacatcagcgaggacgaggaggaggaggagatcgaggtggaggagggcgacgaggaggagcccgcccaggaccaccaggcccccgaggccgcccccaccggcatcccctgcagcgagcaggcccacggcgtgcccttcagccccgaggagcccctgctggagccccaggcccccggcacccccagcagccccttcagcccccccagcggccaccagcccgtgagcgactggggcgaggaggtggagctgaacagccccagaaccacccacctggccggcgccctgagccccggcgaggcctggcccttcgagagcgtgtag

SEQ ID NO: 259 - DNA, 531 bp, Artificial Sequence
  Description of Artificial Sequence: Synthetic Transcript Sequence
atgcggatctttgcagtgtttattttcatgacttattggcaccttttgaacgctccttacaataagattaatcagcggatactcgtcgtggatcccgtaacaagtgaacacgagctgacatgtcaggctgaagggtaccctaaggctgaggttatctggacatccagcgaccaccaggtgctatcaggaaaaacaactaccacaaatagcaagcgcgaggagaagcttttcaatgtgacatctacactgcgaattaatacgacaacgaatgagattttttactgtacattcagaagacttgatccggaggagaatcacacagccgagctcgttattccggagctgccactggcacatccgcccaacgagcgcacacacctagttattctcggcgctatacttctttgtcttggtgtagcattaacctttatcttccgcctacgcaaaggccgcatgatggatgtcaagaagtgcgggatccaagatacgaattcgaaaaaacagtccgacacccacctcgaagaaacttag

SEQ ID NO: 260 - DNA, 873 bp, Artificial Sequence
  Description of Artificial Sequence: Synthetic Transcript Sequence
atgaggatctttgcggtgttcatattcatgacctactggcacctgctgaatgcattcacagtcaccgtacccaaagacctatacgtggttgagtatggctccaacatgaccattgaatgtaagtttcctgttgagaaacagctcgatctggccgccctgattgtttattgggagatggaggacaaaaatatcattcaattcgtgcacggcgaggaggatttaaaagttcaacactccagttatcgtcaaagggcccgtctcctcaaggatcaattatccctgggaaacgcggccctccagattacggatgtcaaactacaagacgccggggtttacagatgcatgatatcatatggtggggccgactacaaacggatcactgtgaaggtcaatgctccatacaacaaaatcaatcaacgtatcctggtggtggacccagtcacatctgagcatgaactgacttgccaggctgagggatatcctaaagccgaggtaatttggaccagttcagaccaccaagtcctgtctggcaagacaacgaccacaaattctaaacgtgaagagaagcttttcaatgtcacaagtacattgcgtatcaatactactaccaatgagatcttctattgtacctttcgccgactggatccagaggaaaatcacaccgcagagttagtgatccccgaactgccacttgcacatccacctaacgagagaacccacctcgtcattctaggtgctattctcctgtgcctcggggtcgcattgacattcatcttcagattgaggaaagggaggatgatggacgtcaagaaatgtgggatccaggacacaaactcgaaaaaacaatccgacactcaccttgaagaaacttag

SEQ ID NO: 261 - DNA, 612 bp, Artificial Sequence
  Description of Artificial Sequence: Synthetic Transcript Sequence
atggtacggctgcccctacagtgtgtcctctggggttgcctgctgacagcagtgcacccagagccgcccaccgcatgccgggaaaagcaataccttatcaactcgcaatgctgctccttgtgccagcccggtcagaaacttgtatcagactgcactgagttcaccgaaaccgagtgcttaccatgcggggaatctgaattcctcgatacatggaaccgagagacacattgtcatcagcataagtactgtgacccaaacctaggattacgcgtccagcagaaaggaacctcagaaacggacactatctgtacatgcgaagagggatggcactgtacctcagaagcatgcgagagttgtgtgctccaccgtagttgttctcccggctttggcgtgaagcaaatcgcgactggggtatctgacaccatttgtgaaccatgtccagtcggtttctttagcaatgtttcttctgcgttcgagaaatgtcacccctggacgcgatcccccggctctgcggaaagccctggcggcgatcctcatcaccttcgagatccagtgtgccatccactgggcgcgggtctttatcaaaaaggcggacaggaggccaaccagtag

SEQ ID NO: 262 - DNA, 786 bp, Artificial Sequence
  Description of Artificial Sequence: Synthetic Transcript Sequence
ggccgctcaccccttagaacacgcgatcgggttctgacaaattgggaggatgggttgaccgtcgcttatggggcagtgaagctgattcagagcctgtctttgcaacccgtcgggtggcagcagaactggggactgtcaagccctcccacaatgctgctgccctccagagctcagtcccccactgagctgcccctggcccctttagcagaacctaacaccggctgttcttcgctgctgtcttggcacagcacccgaggcgaactgcatctatgggctttgggcctggggcagatgggtggctccaagtgtgggagtccactcagtcccttagcccctacgttggaggcactgcgacgaccctggtgcggccagcaaggtgctggcggcactcggggcatttcgaccgatccaccaagcggtaagggagggagagcatggggccgcgatccccttccacgggaaggactactgagaggtaccgccgccccagctgctgggggagatctaacaccttgcctgtctagaccacccacacctagtagaaatcctcgccggagtatattcccgacaatctttctggctccaacactgctactacagtgccggcgtctgtatatggacgccaatagaagtccacgcagaatggcgaagagggtcgcctctcaatgccgtagggattcagaggccgcccccacacaggagtgcggccatgtgggtaagcaggctgtcggacagcgtgcctggtgctgctgttgctgcggagttagggtgaggggatggcactag

SEQ ID NO: 263 - DNA, 834 bp, Artificial Sequence
  Description of Artificial Sequence: Synthetic Transcript Sequence
atggtaagattaccactgcagtgtgttctgtggggctgcttgcttacagccgtgcatccagagccccctacagcgtgcagagaaaagcagtatctcattaattcacagtgctgctcactctgccagccggggcagaagcttgtgtctgattgtacggaatttaccgaaacagaatgcctcccttgcggggaatcggagtttctggacacctggaacagagagacacattgccaccagcataaatactgtgatccaaacttgggcctgcgtgtgcagcaaaaaggcacctcagaaaccgacacaatttgtacatgtgaagaaggctggcactgcacatctgaggcgtgtgagtcctgtgtgctgcaccgtagctgttctcctgggttcggagtcaagcagattgccaccggcgtaagtgatactatctgcgagccatgccccgtgggtttctttagcaacgtgtcttccgctttcgaaaagtgtcatccttggacaagttgtgagactaaggatttggtggttcagcaagcaggcacaaacaaaactgatgtggtgtgcgggcctcaggatcgcctgagggccttggtggttatcccaattattttcgggattctgttcgcgatcctccttgtgcttgttttcatcaaaaaggttgccaaaaaaccaactaataaagcgccccacccaaagcaagaacctcaggaaatcaacttcccagacgacctgcctggctccaatacagcagcgccagtgcaggagactcttcacgggtgtcaaccagtgacccaggaagacggcaaggagagcagaattagtgttcaggaaaggcagtag

SEQ ID NO: 264 - DNA, 723 bp, Artificial Sequence
  Description of Artificial Sequence: Synthetic Transcript Sequence
atgatcgagacttacaaccagaccagccctcggagcgccgctaccggtctaccgatcagcatgaagatcttcatgtatctcctaacagtgttcctgattacacagatgattggctcggccctcttcgcggtctacctgcaccgccgcctagacaagattgaggatgagagaaatcttcacgaggattttgtgttcatgaagaccattcagcggtgtaacacaggggagagatcactttcactgctgaattgtgaagaaatcaagagccagtttgaaggattcgtgaaggacattatgttaaacaaggaagaaacaaaaaaagagaacagcttcgaaatgcaaaaggtgttacagtgggccgagaaagggtattacacaatgtcaaacaacttggtgacacttgagaacggtaaacagctgacagtcaaacggcagggtctgtattatatctatgcccaggtcacattttgctctaacagggaggcctcgtcacaggccccattcatcgccagcctatgtctgaaaagcccgggccgcttcgagaggatactgttgagggctgctaatacacatagttctgctaaaccctgcggtcagcagtccatccacctgggcggcgtgtttgaacttcaaccgggcgcatccgtatttgtcaacgtgacggatccatcccaagtttcacacggaactgggttcacaagttttggcctgctcaaactctag

SEQ ID NO: 265 - DNA, 786 bp, Artificial Sequence
  Description of Artificial Sequence: Synthetic Transcript Sequence
atgatcgagacatataaccagacctccccaagatccgcagctaccgggctgcctatcagcatgaaaatctttatgtacttgttaacggtgtttttgatcacgcagatgatcggaagcgccctctttgcagtgtatctgcatagaaggcttgacaaaattgaagatgagagaaatctgcacgaagacttcgtgtttatgaaaaccatccaacggtgtaacaccggggagcggtctcttagcctgctgaattgcgaagagattaagagccaatttgagggttttgtgaaagacatcatgctgaacaaagaggaaaccaagaaagaaaactctttcgagatgcagaaaggtgaccagaaccctcagatcgccgcccacgtgatctctgaggccagttccaagactacatctgtgctccaatgggccgaaaaaggctactacactatgtccaataacttggtgaccctagagaacggaaagcaactgaccgtgaaacggcagggactgtactacatttacgcccaggtgacgttctgctccaaccgcgaagccagttctcaggctccttttatcgccagtctttgcctcaaaagccccgggcgattcgaaagaatcctgttgagggcagcaaacacacactcatccgctaaaccttgcgggcagcaatcgatccatcttggcggagtctttgaactgcagcccggcgcctctgtattcgtgaacgtcacggacccaagccaggtgagccatggaacagggtttacatcatttggactgctaaagctgtag

SEQ ID NO: 266 - DNA, 5169 bp, Artificial Sequence
  Description of Artificial Sequence: Synthetic Transcript Sequence
atgcggactggctgggcaacacctagaaggcccgccgggctccttatgctgctgttctggttcttcgatttggccgaaccaagtggtagagcagcaaatgatccttttaccatcgtccacggcaacacaggcaaatgcattaaacccgtctacggatggatcgtcgccgacgattgcgatgaaaccgaggacaagctttggaagtgggtttcccagcatagattgttccatctgcattcacagaagtgccttggtctggacattacgaaatctgtcaatgagctgaggatgttctcatgcgattcttctgccatgctatggtggaagtgtgagcaccactccctttacggtgccgcgaggtaccgcctggctcttaaagacggacatgggacggctattagtaatgctagtgatgtttggaagaaagggggcagcgaagaaagtttatgtgaccagccatatcatgagatctacactagagatgggaattcatatggacggccctgtgagtttccttttctgatcgatggtacatggcaccacgactgcatcctggatgaggatcactcaggaccctggtgcgccactactctcaattatgaatatgatagaaagtggggtatctgcttgaagccagagaacggatgcgaggataactgggagaagaacgagcagttcgggtcttgctatcagttcaacacacagacagcccttagctggaaagaggcctacgtgtcctgccaaaatcagggcgccgatttgttaagcatcaattccgcggcagagctcacatacctgaaagaaaaggagggtattgcaaagatcttctggatagggctgaatcagctttactctgcccggggctgggagtggtcagatcataagcctctcaatttcctcaattgggaccctgataggccctccgcccctaccatcggtggctcctcttgcgcgcggatggacgcggaatcaggcttatggcagtctttcagctgtgaggcacagttaccgtatgtgtgtcggaaacccctcaataacacagtagaactaaccgacgtgtggacgtattcagataccagatgcgacgctggctggcttcctaacaacggcttctgctacctgctggtgaacgagtccaacagttgggacaaggcacatgccaaatgcaaggccttctcctctgacttgattagcatccacagtctcgcagatgtggaagtggtagtgaccaagttgcacaatgaagacattaaagaagaggtgtggatcggccttaaaaatattaatattcccaccttatttcagtggtctgacggaaccgaggttacactgacatactgggatgagaacgagcctaatgttccatacaacaaaacaccaaattgtgtgtcatacctgggcgagcttgggcaatggaaggtccagtcctgtgaggagaaactgaagtatgtgtgtaaaaggaagggcgagaagctgaacgatgcgagttctgacaaaatgtgcccccctgacgaaggctggaaacgtcatggggagacctgctacaagatatatgaagatgaggtaccctttggcacaaattgcaacctaaccatcaccagtaggtttgagcaggaatatctcaatgacctcatgaaaaagtacgacaaaagtcttaggaaatatttttggacaggcttaagggatgtggactcttgcggcgagtacaactgggccaccgttgggggccggcgccgggccgtgaccttttccaactggaatttcttagaaccggcttccccagggggttgtgtggccatgtctacaggaaaaagtgtaggaaagtgggaagtaaaggactgtaggagcttcaaagccttaagcatctgcaaaaagatgtctggacctctcgggcccgaggaggcttcacctaagcccgacgatccatgcccagaaggatggcagagctttcccgcctcactgagttgttacaaggtctttcacgctgaacggatcgttcggaagagaaactgggaggaagcggagaggttctgtcaagccctcggggcccacttatcttccttctcccatgtggacgaaataaaagaattccttcactttttaacagaccagttctccggacaacactggctgtggatcgggctaaacaagaggagccccgacctccagggctcttggcagtggagcgacagaacccctgtcagcaccataatcatgccaaacgagttccaacaggattacgatattcgcgattgcgccgccgtgaaggtttttcacagaccttggcggaggggatggcatttttacgatgacagggaatttatttacctgaggccgtttgcttgcgatactaaattggaatgggtgtgtcagatcccaaaaggccgcactcccaaaactccagactggtataatcccgaccgcgcggggattcacggcccgcctttgatcattgaaggatcggagtactggttcgtggccgatctgcatttgaactacgaggaggccgtgctctactgtgccagcaatcattcctttctggccaccataaccagttttgttggcctaaaagccattaaaaacaagatcgcaaacattagcggagatggtcaaaagtggtggattcggatctccgagtggccaatcgatgaccatttcacttactcaagatacccctggcaccggtttcccgttacttttggggaagaatgtctgtacatgtcggcgaagacttggttaattgacctgggcaaacctaccgactgctctacaaagctgccattcatctgtgagaagtacaacgtgagctctcttgaaaaatactcacccgatagcgctgccaaggtgcagtgcagtgaacagtggatcccttttcagaataagtgctttctgaaaatcaagccagttagtcttaccttctcacaggcctccgacacttgccactcgtacgggggtacactaccaagtgtgttgtcccagatcgagcaggacttcatcacttcgctgctccccgacatggaggcaactctgtggattggtcttcgctggactgcctacgaaaaaatcaacaagtggacggacaacagagaactgacttacagcaatttccacccgctgcttgtttctgggaggctgcggatccccgagaacttctttgaagaagagagtcgttaccattgcgccctgatacttaatttgcaaaaaagcccttttacgggcacatggaactttacgtcttgtagcgaaagacacttcgtgtccttatgtcagaagtattctgaggtgaaaagccgccagacattacaaaatgcttcagaaacggtcaagtacctcaataatttgtacaaaattattcccaaaaccctgacctggcactccgccaaaagagagtgtctgaagagcaacatgcaactggtttctataacagatccataccagcaggcattcctgagtgttcaggcgctgttgcacaattcctctttgtggatcgggctcttttcgcaggacgacgagctcaacttcggatggagcgatggaaagcgactccatttttcaagatgggccgagaccaacggacagttggaagattgcgttgtgttggatacggatggtttctggaaaaccgttgattgcaacgataatcagccaggagcaatctgctactacagcggcaacgagactgagaaagaggtgaagccagtggattccgtaaagtgcccctccccggttttaaacaccccatggatcccctttcagaattgctgttacaatttcataattaccaagaaccgccacatggcaaccacacaggacgaggtccataccaaatgccaaaaactcaacccgaagagccatatcctctctatccgcgatgagaaggagaataatttcgtccttgaacagcttctgtactttaattatatggcatcgtgggtgatgctcggcattacgtaccggaataaaagtctaatgtggtttgataagacaccgctgagttatactcattggagagccggacggcctacaatcaagaatgagaagttcctagcaggactgtccaccgacggcttctgggacatccagacattcaaagtaatagaagaggcggtttattttcaccaacacagtatcttggcatgtaaaatcgagatggtcgattacaaagaggaatataacacgactctgccccagtttatgccttacgaggatggaatctactcagtgatacaaaagaaagtcacatggtacgaggccttaaacatgtgctctcagagcgggggacacttggcaagcgtgcataaccagaacggtcaactcttccttgaagacatcgtgaaaagagatggttttcctttgtgggtgggactaagcagccatgacggaagcgaaagctctttcgagtggtctgatggcagtacattcgattacatcccatggaaagggcaaacctcacccggcaattgcgtcctgttagatccgaagggaacctggaagcacgagaagtgtaacagtgtcaaggacggcgcgatctgttataaacccactaagagcaaaaaactctctcgcctgacctacagctctagatgcccggctgccaaagagaatggatctagatggatacagtacaaaggacattgctacaagtctgatcaggcactccactccttctcagaagccaaaaaattgtgctccaagcatgatcactccgccactatagttagcatcaaggacgaggatgagaacaagttcgtgtcgcgcctcatgcgggaaaataacaatattaccatgcgcgtttggctgggtctctcacagcattcagttgaccaaagttggtcatggctggatggcagtgaggtgacatttgtgaagtgggagaacaagtctaagagcggcgtggggagatgcagcatgcttattgcatcgaacgagacatggaagaaggttgagtgcgaacatggttttggtcgagtggtttgcaaggtgccactcggtccggactacaccgccattgcaataatagtagcgaccttgagtatcttggtcctcatgggcggactgatctggtttcttttccaacggcaccgcctacacctcgccggcttttctagcgtccgttatgcacagggcgtcaatgaagacgaaatcatgctgccttccttccacgattag

SEQ ID NO: 267 - DNA, 5454 bp, Artificial Sequence
  Description of Artificial Sequence: Synthetic Transcript Sequence
atgcgcaccggatgggccacccccagaaggcctgccggtctccttatgctccttttctggttcttcgatctggcagaaccttctggacgagcggctaacgatccttttactatagtgcacggtaacacgggcaagtgcataaaacctgtgtacggatggatagtggccgacgattgcgatgaaacggaggacaaactgtggaagtgggtttcccagcatagactgttccaccttcatagccaaaaatgtttgggcctggatataaccaaatcagtaaacgagctccgaatgtttagctgcgactccagtgccatgctatggtggaagtgcgagcaccactctttatacggggcggctcgttatagactggccttaaaagacggccacggcacagccatttctaacgcctccgacgtctggaagaaagggggaagcgaagaatctctctgcgaccagccctaccatgaaatatatacccgtgatgggaacagctatggcagaccctgcgagtttccattcctaattgacggtacatggcatcacgactgtatactcgatgaggaccactcaggtccttggtgcgcaacaacacttaattatgaatacgatcgcaagtggggtatttgcctgaaacccgagaacgggtgcgaagacaattgggaaaagaatgaacagttcggatcttgctaccagtttaacactcagacagccctgagctggaaagaggcatatgtgtcctgtcagaaccagggcgctgatctgctatcaatcaactctgccgctgagctcacgtacttgaaagagaaggagggtatcgctaagatattctggatcggcttgaaccaattgtactcggcaaggggatgggagtggagcgaccataaacctctcaacttcctgaattgggacccagataggccttccgccccaacaattggggggagtagttgcgctaggatggatgccgagagtggtttatggcagagcttttcctgcgaggcgcagctgccctacgtttgccgcaagccactcaacaacacggtcgagctcacggacgtatggacttactctgatacccgttgtgacgccggatggctgccaaacaatgggttctgctatctcttagtgaacgaatctaactcttgggataaagcccatgccaagtgtaaggcgttttcatcagacttaatttctatccacagcctggccgacgtggaggtagtcgtcacaaaactacataatgaggatataaaggaggaggtttggataggcttaaaaaatatcaacattcctaccctctttcagtggtctgatggcacggaagtgactctgacatattgggacgagaacgagcccaatgtgccatataacaaaaccccgaactgcgtgtcttacctaggagaactgggccagtggaaagtgcagtcctgcgaagagaagctcaagtacgtatgcaagcgtaagggtgagaaactcaatgatgctagttcagacaagatgtgtcctcccgatgagggttggaagcgccacggggagacttgctacaagatatacgaggacgaggtacctttcggtacgaattgcaacctgacaattacctcacggttcgaacaggagtatcttaacgacctgatgaagaagtatgataagtctttgcgaaagtacttttggacagggctgcgcgatgtggacagctgcggcgagtataattgggcaactgttggtggcaggagaagggcagtgacattttcaaactggaactttttggagccggctagccccgggggctgtgtggccatgtccaccggcaagtccgttggaaaatgggaagtgaaggattgccggtcctttaaagccctgtccatatgcaagaaaatgagcggcccactcggccccgaggaagcttcacccaagccagacgacccttgtccggaaggctggcaatcatttcccgccagtcttagctgttacaaggtcttccacgccgaaaggatcgtaaggaagcggaattgggaagaggcagaacgattttgtcaggccctgggagcccatttgagttctttctcacatgtcgacgagattaaagaattcctgcacttcctcaccgatcagttttcgggccagcactggttgtggatcggactgaacaagcgcagccccgatttacagggtagctggcaatggtctgaccggacgccagtgtcaaccattattatgcctaacgaattccagcaggattatgatataagggactgcgccgccgtgaaggtgttccaccggccatggaggcgtggctggcacttttatgatgatcgagaatttatctacctcagaccttttgcctgcgatacaaagctggagtgggtatgtcagattccgaaaggcaggacaccaaaaacccctgattggtacaatcctgatcgcgccggaattcacggcccccctctaattatcgaggggtcagaatactggttcgtggcggacctgcacctgaattacgaagaggccgtgctttattgcgcctctaatcactcattcctggccaccatcacctccttcgtgggactcaaggctattaagaacaaaattgcgaatatatccggagatggtcagaaatggtggattcgaatcagcgaatggcccattgacgatcactttacctacagtcgctatccctggcaccggtttccagtcacgttcggcgaggagtgcctctatatgtctgcaaagacctggttaatcgacctgggtaagccgactgattgttctacaaaactgcctttcatctgcgagaagtacaatgtgtctagcctggagaagtactccccggattctgcggccaaggtgcagtgctcagaacagtggatccccttccaaaacaagtgctttctaaaaattaagccagtgtctctcacgttcagtcaggcctccgacacttgccattcatacgggggtacgttacctagcgtgctgagccaaattgagcaagatttcatcacaagcttgcttcctgatatggaagccactttgtggatcgggcttaggtggacagcctacgagaagatcaataagtggacagacaatagggagctgacctacagcaattttcatccacttcttgtctctggccgattgcgaatccctgagaattttttcgaggaagagtctcgatatcactgtgctttaattctgaacctgcagaagtctcctttcaccggtacttggaacttcactagctgcagcgagaggcatttcgtgtcactgtgtcagaaatacagcgaggtcaagtctagacaaaccctgcaaaacgctagtgagacagttaaataccttaacaatctctataagattattcccaaaacactgacatggcatagtgcaaagcgtgaatgcctgaagagtaatatgcagctagtctctattacggacccctaccagcaggcctttttaagtgtgcaggctctcttacataattccagcctatggatcggcctcttctcacaagatgatgaactaaattttggctggtctgacggaaagcgactccatttctcaagatgggcggagaccaacggccagctggaagactgtgttgtgctagatactgacggcttctggaaaaccgtggactgcaatgacaatcagcccggcgccatctgctattactctggtaacgagaccgagaaggaggtcaaacccgttgattctgtaaaatgtccatcaccggtcctcaacacgccatggattccgttccagaattgctgctacaacttcattatcaccaagaatcgacacatggccactacacaggatgaagttcataccaaatgtcaaaaactgaacccgaaatcgcatattctcagcatcagagatgaaaaggaaaacaacttcgtgctcgagcaattgctgtatttcaactacatggccagctgggtcatgctcggcattacctacagaaacaaatccttgatgtggtttgataagacccctctgtcctacactcactggagagccggccggccgactatcaaaaacgagaaattcctcgcaggcctatctacagacggattttgggacatccagacttttaaagtgattgaagaagcagtttacttccatcaacatagtatcttagcctgcaaaattgagatggtcgactacaaggaagagtataacacaacattaccacaatttatgccatacgaggatggcatctactcagtcatccaaaaaaaggtaacttggtacgaggcactgaatatgtgttcacagtcgggggggcacctcgcctccgtccataaccaaaacggccaactgttcctggaggacatcgttaagcgagatggatttccactttgggtcgggttgagcagccatgacggcagtgagagcagctttgagtggtcagacgggagtactttcgactatatcccctggaaaggccaaactagcccagggaactgcgtcctgctggaccctaagggcacttggaaacacgagaaatgcaactccgtcaaggacggtgctatttgttacaagccaacgaaaagcaagaaactctctcggctcacttattcaagcagatgcccagccgccaaggaaaacggatcgcgctggatccagtacaagggccactgttacaagagcgaccaggcattgcattcctttagcgaggcaaagaaattatgcagtaagcacgaccatagtgcaacaattgtgagcattaaagacgaggacgaaaacaagttcgtcagccgcctgatgagagaaaataacaatatcacaatgagggtgtggctcggcctgagccagcattccgtggactgtccaagtagtacttggatacagttccaggatagctgctacatctttctgcaggaggctattaaggtggagtccatcgaggatgtgaggaaccagtgcactgaccacggggccgacatgattagtattcacaatgaagaagaaaatgctttcatcctcgacacactcaagaaacagtggaagggacctgacgatatactacttgggatgttctatgacacagatgacgcaagttttaagtggtttgataattccaacatgacctttgataaatggacggatcaggatgacgatgaggatttagtggacacctgcgcctttctgcatattaagactggcgaatggaaaaagggtaactgcgaagtatcatctgttgagggcactctgtgcaagacggctatcccttataagcgcaagtacctgagtgacaaccacattctgatcagtgccctggtgattgccagcacagttatcttgactgtcctgggcgccatcatttggttcctatataaaaagcattcagattctcgatttaccacagtgtttagcacagctccccagtccccctacaacgaggactgcgtgctggtcgttggggaggagaacgagtatcccgtacagttcgattag

SEQ ID NO: 268 - DNA, 5622 bp, Artificial Sequence
  Description of Artificial Sequence: Synthetic Transcript Sequence
atgagaactggctgggcgactcctaggcggcccgccggtttgctgatgctccttttttggttttttgacctcgcagaacccagcgggagagccgccaacgatccattcactatcgtccatggtaacactggtaaatgcattaagcctgtgtacggatggattgtggcggacgattgcgatgaaactgaagataagctttggaagtgggtaagtcaacatcggctctttcacttgcattcccagaagtgtttgggtctggatattaccaagagtgtgaatgagttgcgcatgttctcatgcgactcctcagccatgctctggtggaagtgcgagcatcactctctttatggggcagcgcgttacaggttggccttaaaggatggccatggaactgccatctccaacgcttccgacgtttggaagaaaggcgggagcgaggagtcgttgtgtgatcagccttatcacgaaatatatacacgcgatggtaatagttacggaaggccatgtgagtttccgtttctcatcgacggtacctggcatcatgattgcatcctagacgaggatcattcaggcccctggtgcgctaccacactgaactatgaatacgataggaagtggggtatctgtctgaaacccgaaaacggctgcgaggacaactgggaaaagaacgagcagttcggtagctgctatcagtttaacactcagaccgccctctcctggaaggaagcatacgtgagttgtcagaaccagggggccgatcttctgtctataaattctgcagcagagctgacctatttaaaggaaaaagaagggattgcgaaaattttttggattgggttgaatcagctttatagcgcccgggggtgggaatggtccgaccacaaaccattgaactttctcaactgggatcccgatcgcccgtccgctcccacgattggcgggagcagctgtgcccgcatggacgccgagtctggactgtggcaatcgttctcatgcgaagcccagttgccttacgtctgtcgcaaacctttgaacaacactgtggagctgactgatgtgtggacatattccgatacacgttgcgatgcaggatggctgcctaacaatgggttctgctatctactggtgaatgagtctaacagctgggacaaggcacacgccaagtgcaaggcattttcaagcgacctcatcagtattcatagccttgccgatgtcgaggtggtcgtcaccaaactgcacaacgaagatatcaaggaagaggtgtggatcggccttaaaaatattaatatccctacactctttcaatggtctgacggcaccgaggtaacattgacctattgggatgagaatgagcctaacgtaccttacaataaaactcccaactgcgtctcgtacttgggcgaactggggcagtggaaagtgcaatcctgcgaggagaagctcaagtatgtgtgtaagagaaaaggggaaaaattgaacgatgcatcgtccgataagatgtgcccaccagacgaaggctggaagagacacggagagacctgctataagatctatgaagatgaagtgccattcggaactaactgcaaccttaccatcaccagccgcttcgagcaagaataccttaacgatctgatgaagaagtacgacaagagtcttcgaaaatacttctggactggcctgcgcgatgtggattcatgcggggagtataattgggccactgtaggaggacggcgacgtgccgttacattctccaattggaatttcctcgaacccgcaagccctggtggatgcgtggccatgagcacaggtaagagcgtggggaagtgggaagttaaggattgccgctctttcaaggctctctccatatgtaaaaagatgtccggacctctgggccccgaggaagcttcccctaagcccgacgatccatgccctgagggctggcaatcatttcccgcatcactgagctgctataaggtgtttcatgccgaacgcatcgtgagaaagcgaaactgggaggaagcagagagattctgtcaggctttgggggcacatctgtcttcttttagtcacgtggatgagattaaggaatttctgcatttcttaaccgaccaattttcaggtcagcattggctatggattggattaaataagcgcagtcctgacctgcagggctcgtggcagtggtcagataggactccggtgagtacgatcatcatgcctaatgagttccagcaggactatgatatccgggactgcgccgcagttaaagtatttcacaggccttggagaagggggtggcacttctatgacgatagagagtttatctatctccggccctttgcatgtgataccaagctggaatgggtgtgccagattcctaagggccgaacacctaagaccccagattggtataatcctgacagagcgggcatacatggacccccattaatcatagaagggagtgaatattggtttgtggcagacttacatttgaattatgaagaggccgtcttgtattgtgcatccaaccacagctttcttgccaccattacatccttcgtaggactgaaagctatcaaaaacaaaatcgccaacataagcggcgatggccagaaatggtggatccggattagtgagtggcccattgatgatcactttacgtacagccgttacccatggcatcgctttcctgtgacctttggtgaggaatgcctttatatgtccgccaaaacatggctcattgatttaggcaaacctactgactgtagcacaaagcttccatttatctgcgagaagtataacgtcagcagtctcgagaagtattctccagatagcgctgcaaaggtgcaatgcagtgaacaatggattccatttcagaacaagtgttttctgaaaattaaacctgtgtcactcaccttttcccaggcctccgacacctgtcactcctatgggggaacgctcccatctgtgctttcccagatagaacaggattttatcacaagcctgctgcccgacatggaagccacactttggatcggactgcggtggactgcgtacgagaagatcaataagtggaccgacaatagggaactcacttacagtaattttcaccccctcctcgtctcagggcgcttgcgaatccctgagaatttcttcgaggaagagagcaggtatcattgcgccctcatcctaaacttacagaagagcccttttactggcacgtggaatttcacctcttgcagtgagcgccactttgttagcctgtgtcagaagtacagcgaagtgaaatcacggcagacactgcaaaatgctagtgagacagttaagtacctgaacaacctttataaaatcattcccaagactctgacctggcactctgctaagcgtgagtgcttgaaatccaatatgcagttagtgagcatcactgatccctaccagcaagcctttttgtcggtgcaagcactcctgcataactcctcactctggatcggtttatttagccaggacgatgaactgaattttggctggtccgacggtaagcgactgcattttagcaggtgggccgaaactaatggacaactggaagactgtgtggttttggacacagacggcttttggaagacggtggactgtaacgataatcaacccggagctatctgctactatagtggcaacgagactgaaaaggaggttaaacctgtggactcagtgaagtgcccatcacccgtccttaatacaccttggattccattccagaactgttgttacaatttcattattacaaagaataggcacatggcgacgacccaggacgaggttcatacaaagtgccagaaactcaaccccaaaagccacattctctctatccgggatgaaaaagagaacaatttcgtcttggagcagctgctctatttcaattacatggcatcctgggtgatgctgggcatcacctacaggaataagagcctgatgtggttcgacaaaactcctctctcttacacacactggagagcagggaggcctaccataaaaaacgagaaattcctggccgggctgtccacagatgggttctgggatatccaaaccttcaaggtgatcgaggaagctgtttattttcaccagcactcaatcctcgcctgcaagatagagatggtcgactataaagaggaatacaacacgactctcccacagttcatgccatacgaagacggaatctatagcgtgatccaaaagaaagtgacttggtacgaagcattaaatatgtgctctcagagcggcggacacctggcgtctgtgcataaccagaatgggcagctttttctggaggacattgtgaagagggacggcttccctctgtgggtaggcctgtcctctcacgatggttcggagtcctccttcgagtggtctgacggttccacctttgattacatcccatggaagggccagacatctcctgggaattgtgtacttcttgaccccaaaggtacgtggaaacacgaaaagtgtaatagtgttaaggatggcgccatatgctacaagcctacgaagagtaaaaagctcagccggttgacttactctagccgatgtcctgcggctaaagagaatggaagtcggtggatccagtataaaggacattgctataaatcagatcaggcccttcattcattctcagaggccaaaaaactctgctcaaagcacgaccatagcgctaccatagtgtctattaaggatgaggacgaaaacaagtttgtgagccggctcatgcgtgaaaacaacaacattactatgagagtgtggctcgggctgtcccagcatagcgttgatcaaagttggtcctggttggatgggtcggaagttaccttcgttaagtgggagaacaagtccaaaagtggtgtggggagatgtagcatgctgatcgccagcaacgaaacttggaagaaggtggaatgtgagcatggctttggccgcgtggtgtgtaaagtacctcttgactgcccctcgtctacgtggattcaattccaagatagttgctatattttcctgcaagaagctatcaaggtggaatcaatcgaggatgtgagaaatcaatgtactgaccatggcgcggatatgatatccatccacaacgaagaggagaatgcctttatactggacactctgaaaaaacagtggaagggccctgatgatatcctgctagggatgttttacgacaccgacgatgcttcgttcaagtggttcgacaattcaaatatgacatttgataagtggaccgaccaggacgatgacgaggaccttgtcgacacctgtgctttcctgcacattaagacaggggagtggaagaagggaaactgtgaggtgtccagcgtggagggcactctgtgtaagacagccattccatataagaggaagtatctaagcgacaaccacattttgatttcagcactggtaattgccagcaccgttattctcactgtactaggggccatcatttggttcttatacaaaaagcacagcgattctcgatttaccacagtgttttctactgctcctcaaagcccttataacgaggattgtgtgctggtggttggggaggagaacgaatatcccgtgcaatttgattag

SEQ ID NO: 269 - DNA, 186 bp, Artificial Sequence
  Description of Artificial Sequence: Synthetic Transcript Sequence
atgaaaagatttctcttcctactcttgactatttcacttctggtgatggtccagatccagacaggccttagcgggcagaacgatacaagccaaacctcctcgccatccgcttccagtaatatttcggggggaattttcctctttttcgtagccaatgccattatccacctcttttgcttttcatag

SEQ ID NO: 270 - DNA, 1062 bp, Artificial Sequence
  Description of Artificial Sequence: Synthetic Transcript Sequence
atggagctgaccgagcttctgctagtggtcatgctgctgttgacagcccgactgacgctgagctctccagctccacctgcctgtgacctccgggtactgtctaagctgctccgagattctcacgttttacactctagactgagccagtgcccagaggtacaccccctacctactcccgtcctcctgccagccgtcgacttcagtctaggcgaatggaagactcagatggaagagacaaaagcacaagatattctgggcgccgtgactttgctgctagagggcgtcatggctgctagaggccagttaggacctacatgcctttcaagcctccttggccagctgtcagggcaggtcagattgctcttgggcgcactgcaatcactactcggaacccagctgccgcctcaggggcggaccaccgcccataaagaccccaacgctatattcttgagcttccaacatctcttgcggggaaaggtcaggtttctgatgttggtaggagggtcaaccctctgtgttagacgggcaccacctaccacggccgtcccctccagaacctccctggtcctgaccctaaatgaactccctaataggactagtggattgctggagaccaatttcacggccagtgcgcggacaacggggagcggactgttgaagtggcaacagggatttcgggctaagattcctggactgctgaaccagacctccaggtccctcgaccaaatacctgggtatctgaatcggattcacgaactcctcaatggaacacgcgggctattccctggaccctctcgacgcacattgggagctcccgacatctcttcaggtacctccgacacagggtccctcccacccaaccttcagcctgggtattcaccctccccgactcaccctcccacagggcagtatacactttttcctttgcctcccaccttgccaacccctgtcgtccagctacaccccctcttgcctgatccatctgcgcccacaccaacacccacatctcccctccttaacactagttacacacattcacaaaatcttagccaagaaggatag

SEQ ID NO: 271 - DNA, 537 bp, Artificial Sequence
  Description of Artificial Sequence: Synthetic Transcript Sequence
atgacggtgctggcaccagcatggagcccgaccacctatttactcctgttgctcttgttgtctagcggcctctcggggacgcaggactgttccttccagcacagtccaatcagctctgattttgctgtgaaaattcgagaactttcagactatctcctccaagattacccggtaacagtggcttctaacctccaggacgaggaactttgcggcgggctgtggcggctcgttttggcccagcgctggatggagcggctgaagacagttgctggcagcaaaatgcagggacttctggaacgggtcaatacagagattcactttgttacaaaatgcgcatttcagccgccaccctcctgtctgcggttcgtgcagactaacatttcacgtctgctgcaggagacaagcgagcaactggtcgctctaaagccctggattacaagacagaacttttcacgctgtctcgagctgcaatgccaacccgtggagactgtgttccacagggtctcgcaagatggcttagacctgttaacatcatag

SEQ ID NO: 272 - DNA, 708 bp, Artificial Sequence
  Description of Artificial Sequence: Synthetic Transcript Sequence
atgacagtgctggcccccgcctggagcccgacaacctaccttcttctgcttttgctccttagtagtggactgagtggcacacaggattgctcattccaacacagccccatttcctccgacttcgcagtgaagatccgggagctgagtgactatttactgcaggattatcccgtgacagttgcctccaatcttcaggatgaggagctgtgcggcggattatggagactcgtgctggcacagcgctggatggaacggctaaagactgtggcaggaagcaaaatgcaggggctgctggagcgagtgaacacagagatacactttgtcaccaagtgtgcattccagccccctcccagctgcctccgcttcgtgcagaccaacatctcacggttgctgcaggagaccagtgagcaactggtggcccttaagccgtggatcacacggcagaattttagccggtgtctggagttgcagtgccaacccgacagctctacattaccccctccttggagcccgcgcccccttgaagccacggcacccaccgccccgcagcctccgctgctgctgctactgctgctgccagtgggtcttctactgctggccgctgcatggtgtcttcactggcaaaggacaagacgtcgcactccaagacctggagagcaggtgccgccagtgccatcaccccaggacctgctgctggtagagcattag

SEQ ID NO: 273 - DNA, 1110 bp, Artificial Sequence
  Description of Artificial Sequence: Synthetic Transcript Sequence
atggtatgggccccacttgggcctccacggaccgactgtctgaccctccttcatacacccagcaaggattcaccaaagatgtccctggaatggttagttgcatggagctggagcctggacggcttacgcgattgcatagctacaggcatccagtccgtaagagactgcgatacgacagccgttatcactgtcgcttgcctgttagtgctgtttgtctggtattgctatcacgtaggtcgagaacaaccccggccatacgtgtcagttaactcactgatgcaggcagcggacgccaatggacttcaaaatggttatgtctactgccagtcacccgaatgtgtccgttgtacccataatgagggcctgaatcagaaactctaccacaatttacaggagtacgcaaaacgctatagctggagcgggatgggcaggattcataaggggattagagagcagggtagatacctaaacagcagaccttctatacagaaacccgaggtgtttttcttgcctgaccttccaactaccccttacttcagtagggacgctcagaagcatgacgtagaggtgctggagcgaaattttcagaccattctctgcgaattcgaaaccctctacaaggctttcagcaattgcagcctcccacagggctggaaaatgaacagcacaccctctggagagtggtttaccttctacctggtcaatcagggagtttgcgtgccacgtaactgcagaaaatgccctcgcacatacaggctgttagggtccctgaggacatgcattgggaataacgtcttcggtaacgcttgcatttctgtgcttagcccggggaccgtaattacggaacactacggacccacgaacatcaggatccggtgccacctgggactaaagacacccaacgggtgcgagctcgtggtggggggagagccgcagtgctgggcagagggccggtgcctgctgttcgatgactcctttctgcacgccgctttccatgaggggtcagctgaagacggcccccgtgttgtattcatggtcgacctatggcacccaaatgtagcggctgcagaacggcaggccttagatttcattttcgctccaggccgctag

SEQ ID NO: 274 - DNA, 1989 bp, Artificial Sequence
  Description of Artificial Sequence: Synthetic Transcript Sequence
atgaggccacagattctgctgctactagcactattaacactaggcctggcggcccagcatcaggacaaggtgccatgcaaaatggtggacaagaaagtctcctgtcaggtactaggactgttgcaggtcccctcggtgctcccgccagatactgagaccctggacctttccggcaaccagcttcgaagcattctagcgagcccgctgggtttctacaccgccctcagacacctggacctctccaccaacgagatcagctttctgcagccaggcgctttccaggcattaacccatctggagcacctatccctggcccacaaccggctcgcaatggccaccgctctgtccgccggcgggcttggaccgctcccgagggtaacctctctcgacctgagtggaaacagcctttactcgggccttctggaacgcctgctgggggaggcccccagcctgcatacactatccctcgcagaaaattccctgacaaggttgactcgacacacatttagggatatgcctgccctcgaacaactggatctgcatagcaacgtgttgatggatatcgaggatggggcctttgagggcctgccaagactcacacacctgaatttgtctcgtaattccttaacttgcatttccgattttagtctgcaacagcttagggttctggacttaagctgcaattctatagaggccttccagactgctagtcagcctcaggccgaattccagctgacctggttagacctccgtgagaacaagctccttcactttcccgatctcgccgcactgccccgactcatttacctgaatctgagcaataatctgattagattaccaaccggtcctcctcaggatagtaaagggatccacgctcctagcgagggatggtccgcacttcctcttagtgctccaagcggaaacgcctctgggagacctctcagccagcttcttaatctggacttatcatataacgagatcgagctcatcccagatagcttcctcgagcacctgactagcttgtgctttctcaatctctctcgcaattgcttgcgcacatttgaggcccgaagactgggctccttaccgtgcctgatgctgctggacctatcacacaacgcacttgagacattggagctcggtgcaagggcactgggttccttacgtactttactactgcaagggaacgctctgagggaccttccaccctatacatttgcgaaccttgctagcctccaacgactgaatctacaaggaaatagagtctccccctgcggcgggccagacgagcccgggccatccggctgcgtggcattttcaggtatcacatctctacgaagcctcagcctggtggataatgaaatcgagttgcttagggccggagcattcttacatactcccctcacggagttggacctgtcttcaaaccccggactggaagttgccaccggggccctgggggggctggaggcgtccctggaggtgttggccttacagggaaacgggctgatggtactgcaggtagacctcccttgttttatctgcctgaaacggttgaatttagccgagaatcgcttgtctcatttaccggcatggacccaggccgtgtctctagaggtgctggacctgcgtaataattccttctctcttctgccaggctccgccatgggcgggctggaaacttccctccggaggttatacttacaggggaatcccctgtcatgttgcggtaacggctggttagcagctcagttacaccagggaagagtggacgttgatgccacgcaggatctgatatgcagattctcttcgcaggaggaagtcagtctgagtcacgtacgcccagaagattgcgagaaaggaggcctgaagaacatcaacttaattatcatactcacctttattcttgtctctgccatcctgctgactaccctggctgcctgttgctgcgttcgtaggcagaaattcaatcagcagtataaggcttag

SEQ ID NO: 275 - DNA, 1989 bp, Artificial Sequence
  Description of Artificial Sequence: Synthetic Transcript Sequence
atgaggccacagattctcctgctgctcgcacttttgacacttggcctcgccgctcagcatcaggataaggtaccctgcaagatggttgacaagaaggtgtcctgccaggtactagggttgctgcaagtgcccagcgtcctgccaccagacacggaaaccctggacctgagcggtaaccaactcagaagcatcttggcctctccactgggattctacaccgctctcagacatctggacttatctaccaacgagatttcattccttcagccaggggcttttcaagccttgacccacttggagcacctgtccctggcccataacaggttggctatggccactgcactgagcgccggagggttgggccctcttccacgcgtgacctcgctagacctgagtggtaattccctctatagcggcctgctggagcgcctgcttggcgaggctccttctctgcataccctgtcactggcagagaatagcctgactagattaactcgccatacattccgagacatgccagctctcgagcagttagatctgcacagcaacgtcctgatggatatcgaagacggcgcgttcgagggacttcccagactaactcatctgaaccttagccgcaatagtctgacatgcatctccgacttctctctccagcagctgcgggtgctggacctgtcatgtaatagcattgaggcatttcagaccgcctcacagcctcaggcagagtttcagctcacctggctggacctaagagagaataagctattgcatttcccagatctcgcagcacttccccggctgatttaccttaatttatctaataacctcatcagattgcctaccgggcccccacaggacagtaaagggatccatgccccgagcgaaggctggagcgctctgcctctgagcgccccatctggcaatgcaagcgggcgtccattgagccagctgctgaacctcgatcttagctataatgagattgaattgattcctgatagcttcctcgagcatttgacatccctatgttttcttaatctgtccagaaactgtctccgcacattcgaggcacgccggctaggctcccttccttgtctgatgctgctggacctcagccacaatgctcttgaaaccctagagctgggcgctcgggctctggggtccttgagaaccctgctccttcagggcaatgccctccgggatctccccccttacacctttgctaacctcgcttcactgcagaggctgaatctgcagggaaacagggtaagtccatgcggcgggcccgacgaacctggtccgtcaggttgcgtcgctttttccggaattacaagcctgcggtcacttagcttagtcgacaatgagatcgagttattgagagcaggagcattcctccatactccgcttaccgagttggatctcagttccaatcctggcctcgaggtggccaccggagcacttggaggcctggaggcatcgcttgaggtcctcgccctgcagggtaacggcctgatggtgctgcaggtcgatctcccatgctttatctgtttaaaaaggttgaatctcgctgagaaccggctgtctcatttaccagcctggacccaagccgtttctctggaagtgctggacctcaggaacaactccttttcactcctgccgggcagtgccatggggggcctagaaaccagcctgaggcggctgtatctgcagggcaaccccttgtcgtgctgcggtaacggatggctggcagcccagcttcaccagggcagggtcgacgttgatgcgacacaagatctcatctgtcgattctcctctcaggaggaggtgtcactgagccacgttaggccggaggactgtgaaaagggcggattaaagaacattaatttgattatcatcctcacatttattctggtgtctgccatactactgacaaccctagctgcctgctgctgcgtaagaaggcaaaaattcaatcagcagtacaaggcctag

SEQ ID NO: 276 - DNA, 1989 bp, Artificial Sequence
  Description of Artificial Sequence: Synthetic Transcript Sequence
atgaggccccagattctactgctgcttgctttgctgaccctcggcttagctgctcaacatcaggacaaagtgccttgcaaaatggttgataaaaaggtctcctgccaggtactgggcttacttcaggtgccatctgtgctgccccccgacactgaaacccttgacttatccggaaaccagctgagatcaatcctcgcatcaccactgggcttctatactgcgcttcgccaccttgatctctccacaaacgaaatttcattcctgcaaccaggagccttccaggctctgacacatcttgagcacctttctttagctcacaaccggctagccatggccaccgcgctatcagctggagggcttggcccactgccacgggtgacatcgttagacctgtcaggcaactccctatacagcggattattagaacgcctgctgggggaagccccatcattgcacacattatccttagctgagaactccttgaccagattgacccggcacacatttcgcgatatgcctgctctggagcagcttgatctgcatagcaacgttctcatggacatcgaggatggcgcgttcgaggggttgccgcggttaacccatctgaacctgtcaaggaattctctcacctgcatcagcgacttctctctgcaacaactccgagtactcgatctgagctgtaacagcatcgaagcgttccaaactgcatcccaaccccaagccgagttccaattgacatggctcgacctgagggaaaataagctcctgcacttccccgaccttgcagcacttccccggctgatttatctgaatctctctaacaacctcatcagactgcctacagggccaccccaggactctaagggcattcatgcaccctccgagggctggagcgccctgcccctgtcagcccccagcggtaatgcctcaggaagacccctcagccaactgctgaacctcgatctgagttacaatgagatcgaactgatcccagacagtttcctcgaacacctcactagcctctgttttctcaatctgagccgcaattgtctgcggaccttcgaggcccgccgcctggggtcattgccctgtctgatgctgttggacctgtctcacaatgccctggaaactctggaactcggtgcaagagcccttggctcactgcgcacattgttgctccagggcaatgctttgcgggacttgcccccttatacttttgcaaatcttgccagcttgcagagactgaacctgcagggtaatcgagtgagcccctgcggcgggccagatgagcccggaccctcaggatgtgtggccttcagcgggataaccagcctccgctctctcagtcttgtggataacgaaatcgaactgctgagggctggcgcatttctacacactcctctaaccgagttggatctgagttctaaccctggtttggaagtggccacaggtgcgctgggagggctcgaggcttcacttgaagtcctggccctccaagggaacggcctcatggtactgcaggtcgacctgccttgctttatatgcctaaaaaggctgaatctggcggagaatcggctgtctcatcttcccgcctggacacaggctgtgtcactagaggtgctagatctgagaaacaatagtttcagcctcctgccaggtagtgccatgggtggcctcgaaacatctctgcgccgcctgtatctgcaaggaaacccgttgtcatgctgcggcaacggatggctggctgctcagttgcaccagggccgtgtggatgtggatgccactcaggatctgatttgcaggttttcctctcaggaagaagtgagcctgtcgcacgtccggcctgaggattgtgaaaaaggcggactcaaaaatattaatctcattataatactgacattcattctcgtgtccgctatacttctcactaccctagcggcgtgttgttgcgtccgccgtcagaaatttaaccagcagtataaagcatag

SEQ ID NO: 277 - DNA, 561 bp, Artificial Sequence
  Description of Artificial Sequence: Synthetic Transcript Sequence
atgaggccacagatcctcctgctgctcgccctgcttacccttggactcgctgcgcagcaccaagataaagtgccatgcaagatggtggataagaaggtgtcgtgtcaggtgctgggcttgcttcaggtcccgagtgtgctgcctccagacacagagaccctggaccttagtggcaatcagctgcgttctattctcgcgagcccgttgggcttctataccgccctgcgtcaccttgatctctctaccaacgagatctcctttctgcagcctggagccttccaggctctgacccatctcgagcacttatccctcgcccacaataggttggcaatggcaaccgcactctctgccgggggcttgggacctctgccccgggtgaccagtttggatctttccggaaactccttatattcaggcctgttggagagactcctgggtgaggccccctctttacataccctctccttggctgaaaattccctgacccgccttaccagacacacctttcgggatatgccagccctggagcagctcgatctccacagtaacgtgctcatgtag

SEQ ID NO: 278 - DNA, 1212 bp, Artificial Sequence
  Description of Artificial Sequence: Synthetic Transcript Sequence
atggctcatgctatggagaattcatggacaatcagcaaggagtaccacatcgacgaggaggttggattcgccctgcctaacccacaggagaaccttccagacttttacaacgactggatgttcattgccaagcacctgcccgacctgatcgagtcaggccaactccgggaacgggtcgagaaacttaatatgctaagtattgatcacttgaccgatcataagtcgcaaagactggcgaggctggtattaggatgtattaccatggcctatgtctgggggaaaggtcacggtgacgtgcggaaggtcctcccgcgaaatatcgctgtcccttattgtcagctctcaaaaaaacttgagttgcctccaattctggtttatgccgattgcgtattggctaactggaaaaagaaagacccgaataagcccctgacatacgagaacatggatgtactattctcatttagagacggagactgctcaaagggtttttttctcgtttcactgctggtggagattgcagcggcctcggctatcaaagtcataccaacagtgtttaaggccatgcagatgcaagaacgagatactttacttaaagctctgttggaaattgcctcttgcctcgaaaaagccctgcaggtgttccaccagatccacgatcacgtcaatcccaaggccttcttttccgtgcttcgtatctatctgtcaggttggaaaggaaatccccagctgagcgatggactggtctatgagggtttctgggaggatccgaaggagtttgctggtggctcagctggacagagttccgtgttccaatgtttcgatgtgttactcggaatacagcagaccgccggaggcggccacgcagctcaatttctccaggacatgcggcgctatatgccacctgcccaccggaacttcctgtgttctttggaatctaacccgtccgtgagggaattcgtactttccaaaggggatgccggattgcgagaggcctatgacgcatgcgttaaagccctggtgtccctcagatcttaccatcttcagatcgttacgaagtacattcttataccggcgtcacaacagcctaaggagaataagactagcgaggacccaagcaaattggaagccaagggcacaggcggaaccgatctcatgaatttcctgaagacggttcggtctaccaccgaaaagtccctgctaaaggagggatag

SEQ ID NO: 279 - DNA, 237 bp, Artificial Sequence
  Description of Artificial Sequence: Synthetic Transcript Sequence
atggctcatgctatggaaaacagctggaccataagcaaggagtaccacatcgacgaagaggtgggattcgctctgcccaatccccaggagaacctacccgacttctataacgactggatgtttattgcaaagcacctgcctgacctcatcgagtccggacaattgcgggaaagagtggagaagctcaacatgctgagtatcgaccacctcactgatcataagagtcagaggctttag

SEQ ID NO: 280 - DNA, 543 bp, Artificial Sequence
  Description of Artificial Sequence: Synthetic Transcript Sequence
atggcccatgccatggaaaattcctggaccataagcaaagagtaccacatcgacgaagaagtaggtttcgcgttgccaaacccgcaggagaacctacccgacttttataacgattggatgtttatcgcgaaacaccttcctgatttaatcgagtccgggcaactgagggagcgcgtggagaagctgaacatgctgagtattgaccacctcaccgaccacaaatcacagcggctcgcccgcctagtgcttggttgcatcactatggcctatgtttgggggaaggggcacggcgacgtgagaaaagtcctcccccggaatatcgctgtgccttactgtcagctaagcaaaaagctcgagttacctccgatactggtttacgccgattgtgtgctggccaactggaagaaaaaagatcctaataagcctttgacatacgagaatatggacgtactgttttctttccgagacggagactgttcaaaaggcttttttttggtttctctactggttgaaattgccgccgcaagtgccatcaaagtatag

SEQ ID NO: 281 - DNA, 1212 bp, Artificial Sequence
  Description of Artificial Sequence: Synthetic Transcript Sequence
atggctcacgctatggaaaattcctggaccatcagcaaggagtaccacatagacgaggaagtgggattcgccctgcccaacccacaggagaacctgcccgatttctacaatgactggatgttcatcgcaaagcacctcccggacctcatagagtccggccaactgcgcgaaagagtcgagaagctaaacatgctgtccattgatcacctgacagatcataagtcacagagactggccaggctcgtgctgggctgcatcacgatggcctatgtctggggtaagggacacggcgacgtcagaaaagttctcccgcggaatatcgccgtcccctattgtcaactgtccaaaaagttggaattgcccccaatacttgtctatgctgactgtgttctggccaattggaagaaaaaagatcccaacaaaccgctaacctatgaaaacatggacgttctcttctcttttagggacggcgactgttctaaaggattctttctggtgtccctgctggtggaaatagctgctgctagcgcgataaaagtgatccctacggtctttaaggccatgcagatgcaggaacgggatacgctgcttaaggccctcttagaaatcgcgtcatgcctcgagaaagcactgcaggtattccatcagattcacgaccatgttaatcctaaggcctttttttctgtcctaagaatctaccttagcggctggaaaggcaacccccagttgagtgacggcctggtttacgaggggttctgggaggaccccaaggagtttgcaggagggagcgccggtcagtcaagcgtgttccaatgtttcgatgtacttctggggattcagcagacggccggggggggccacgctgctcagttccttcaagatatgcgtaggtatatgcctccagcccacagaaactttctttgttcactggagagtaaccccagcgtgagagagtttgttctgagcaaaggagacgcaggtctgcgtgaagcttacgatgcatgcgtgaaagccctggtatccctgcggtcctaccatttacagatagttaccaagtatatcctcatacctgcgtcccagcaacccaaagagaacaagacttcagaggacccttctaaactggaggctaaaggcacaggtggcactgatctcatgaacttcctcaagacggtgcgttcaacgaccgagaagagcctcctcaaagaaggctag

SEQ ID NO: 282 - DNA, 144 bp, Artificial Sequence
  Description of Artificial Sequence: Synthetic Transcript Sequence
atggctcatgctatggagaactcttggacaatcagcaaggagtaccacatcgatgaagaggttggcttcgctctaccaaacccacaagagaatctcccagacttctacaacgactggatgttcatcgctaaacacctgccgtag

SEQ ID NO: 283 - DNA, 1224 bp, Artificial Sequence
  Description of Artificial Sequence: Synthetic Transcript Sequence
atggagcctcatcggcccaatgtgaaaaccgccgttccgctgtctctggagtcataccacatctcagaagaatatggcttcctgttgcctgattccctcaaggagcttcccgaccactacaggccatggatggagatcgcaaacaaattgccccagctgatagatgcccaccagctccaggcccacgtcgataagatgcccctattgagctgtcaattcttgaagggacacagagagcagagactggcccacctggtcctgagtttcctcacaatgggttatgtttggcaggagggggaagcccagccggcggaggtgctgccaaggaacctagcattaccctttgtcgaggtctcgaggaacttgggtctgcctcctatcctggtgcattccgatctggtgcttactaattggactaaaaaggatcccgatggttttctggagatcggaaatttggagactattatcagttttcctgggggcgaatctctccacggatttatcctggtgactgccctagtggaaaaggaggccgtgcctggcattaaggcgctcgtccaagccactaacgctatcctgcagcccaaccaggaagccctgctgcaggccctgcagagactacgcctcagtatccaggatatcactaaaactcttggccagatgcacgattacgtggacccggacatcttctatgctggtatacgcatattcctctccggatggaaggacaatccggcaatgccagccggcctcatgtacgagggggtgagccaggagcccctcaagtattcaggcggaagcgctgctcagtcaacggtgctgcatgcatttgacgaattccttggcattaggcacagcaaggagtccggggattttctttaccggatgcgggactacatgccgccatcccacaaagccttcattgaggatattcattctgccccatccctgcgcgattatattctgagttctggccaggaccatctactgactgcttataaccagtgcgtgcaagccctcgcagaacttaggtcataccacatcactatggtgaccaagtatctgattactgcagctgccaaggctaagcatgggaagccaaatcacctgccaggtccacctcaggcactcaaggatcgcggcaccggtggtactgccgtcatgagctttctaaaaagtgtccgggataagactctcgaaagcatcttacacccccggggctag

SEQ ID NO: 284 - DNA, 1263 bp, Artificial Sequence
  Description of Artificial Sequence: Synthetic Transcript Sequence
atgttgcacttccactattatgatacatctaataaaattatggaaccacacagaccgaacgtcaagacggcagttcctcttagtctggagagctaccatataagcgaggagtatggattcctgttgcctgatagtctgaaggagctcccagatcactataggccctggatggaaatagcaaacaagttgccgcagctgatagacgcgcatcagctgcaagcccacgtggataaaatgccacttctgtcttgtcagtttttgaaaggccacagagagcagcgtctcgcacatctcgtgctgtcttttctgacaatggggtacgtgtggcaggaaggtgaagcacagcccgcggaggttcttcctaggaacctcgctctccccttcgtggaagtgtcacggaacttgggactgcctcccattctcgttcacagcgacttggtgctcacaaattggaccaagaaggatcccgatgggttcctggaaatcggaaatctggagaccatcatttcctttccgggcggagagtctttgcacggtttcattctggtgacagcactcgtggagaaagaggcagttccagggatcaaggctctagtgcaggcaacgaacgcaattctgcagcctaatcaggaggcactgcttcaagccctgcaaaggttgaggttgagtatccaggatatcacaaaaacacttggacagatgcatgactacgttgaccctgatatcttctacgcgggtatccggatatttctctccggctggaaggacaacccggcaatgccagcaggccttatgtacgagggcgtcagccaggagccccttaaatatagtggggggagtgctgcacagtccaccgtgctacatgccttcgatgaatttctcggcatccggcattccaaagaaagtggtgacttcctgtatcgtatgagggattatatgccacccagccataaagcgtttattgaggacatccactccgcaccttcccttcgcgactacatcctctctagcggacaggatcatctcctgaccgcatataaccagtgtgtgcaggcattagcagagctgcgctcttatcacattaccatggtgactaagtaccttatcactgcagctgccaaggcgaaacacggcaaacctaaccacctgccaggtccaccccaggccctcaaggatagaggtacgggcggaacagcggttatgtcctttctgaaatctgtgagggataagacacttgaaagcattctgcaccctaggggctag

SEQ ID NO: 285 - DNA, 537 bp, Artificial Sequence
  Description of Artificial Sequence: Synthetic Transcript Sequence
atgcactcctcagcattactctgttgtcttgtactgttaaccggcgttagggcttcacccggccaggggacacaatccgagaactcctgcacgcatttccctgggaacctccccaatatgcttagggatcttagagacgcattctcccgcgtaaaaactttttttcaaatgaaagaccagctggacaacctgcttctaaaggagagcctcctggaggactttaagggttacctcgggtgtcaggcgctgtcagagatgatccaattctacttagaggaagtgatgcctcaggccgaaaaccaagatcctgacattaaggcacatgtgaacagcctgggggagaacctgaaaactctgcgcctcaggcttagacgctgccacaggtttctgccctgcgagaacaaaagtaaggcggtcgaacaagtgaaaaacgcattcaacaagctacaggagaagggcatttataaggccatgagcgagtttgacatcttcattaattacattgaggcctacatgacaatgaagattcgcaactag

SEQ ID NO: 286 - DNA, 762 bp, Artificial Sequence
  Description of Artificial Sequence: Synthetic Transcript Sequence
atgtggcccccaggcagcgccagccagccccccccctcccctgccgccgcgactggtcttcaccctgctgcccgtccagtcagtctgcagtgtaggctttcaatgtgccccgctcgcagcctcctgttggtggctaccctggtgctgctagaccatctgtccctggcccggaacctgcccgttgctacaccagaccccgggatgttcccctgcctgcaccattcccaaaacctgctgcgcgcggtcagcaacatgctccagaaggctcggcagactctcgaattctacccgtgtaccagtgaggagattgaccacgaggacataactaaagacaagacttccaccgttgaggcctgcctccccttagaactgactaaaaacgagtcatgtctcaattccagagaaacttcatttataacgaacggctcatgtctggccagcagaaagacaagctttatgatggccttgtgtctttcctctatttatgaggatctgaagatgtaccaagtggagttcaagacaatgaacgccaagttgcttatggatcctaagagacaaatcttcctcgatcagaacatgctggctgttatcgacgagctgatgcaggcactaaattttaattccgagacggtgccccagaaatcgtccctggaggagccagatttttacaagaccaagattaaactctgtatactgctacacgcatttcgaattagagccgtgactattgatagagttatgagctacctgaacgcttcctag

SEQ ID NO: 287 - DNA, 720 bp, Artificial Sequence
  Description of Artificial Sequence: Synthetic Transcript Sequence
atgtggcctccaggatcagcaagtcaaccgccccctagccctgccgccgcgaccggcttgcaccccgcggcaagacctgttagtctccagtgcaggctgagtatgtgtccggcccggtccttgcttctagttgctacactggtgttgttggatcacctcagcttagcacgcaatctaccagtggctacaccagaccccggtatgttcccgtgcctgcatcattcacaaaacctcctgagggccgtgagcaacatgctgcaaaaggcacgccagacactggaattctacccctgcacttcagaggaaatcgaccacgaggatattaccaaggacaagacgtccaccgtcgaggcctgcctgccccttgaactaactaagaatggcagctgcctggccagtcgcaagacatctttcatgatggccttatgtctctcctccatatatgaggatcttaagatgtaccaggtggaattcaaaacaatgaacgctaaattattgatggaccctaaacggcagatctttttagatcagaatatgcttgccgtgatcgacgagctgatgcaggcattaaactttaacagcgagacagtgccccagaagagttccctggaggaacctgacttctataagacaaaaatcaagttgtgtatactgctgcacgcctttcgtatacgagctgttaccatcgaccgggtgatgagctacttaaacgcatcctag

SEQ ID NO: 288 - DNA, 648 bp, Artificial Sequence
  Description of Artificial Sequence: Synthetic Transcript Sequence
atgtggcctccagggtcagcctcgcaaccgcctccctctcccgccgccgccacaggccttcaccccgccgccaggcccgtgagtttacagtgcagactgtcaatgtgccccgctcggtcactgctcctggtggctaccctggtactcttggaccatttgagtcttgctcgcaacctcccggtggctactcccgaccctggcatgttcccatgcttacatcactcccagaacttactgcgggctgtatcaaacatgctgcagaaaaacgagtcttgtctgaacagtcgcgaaacttctttcataaccaacggcagctgtcttgcatcacgcaagacgtccttcatgatggccctgtgcctgagttccatatacgaagatcttaagatgtatcaagtggagtttaaaactatgaatgccaaactgcttatggacccaaagcgccaaattttcctcgatcagaatatgttagcagtaatagacgaacttatgcaggcgctgaacttcaattctgagactgtgccacagaagtcctccctggaggaaccagacttttacaagacgaagattaagctctgtatacttctgcatgcattcagaattagagccgtgacaatagatagggttatgtcctacctaaacgcatcctag

SEQ ID NO: 289 - DNA, 429 bp, Artificial Sequence
  Description of Artificial Sequence: Synthetic Transcript Sequence
atgagccttttacccgtcccctacacagaagccgcttcattgtctacaggctccacagtcactatcaagggccggcccctggcctgtttcttaaacgaaccatacctgcaggtcgacttccacaccgaaatgaaggaggaaagcgacatcgtttttcactttcaggtttgtttcgggaggagagtagtgatgaatagccgggagtacggcgcttggaaacagcaagtggaatccaaaaacatgccctttcaggacggacaggagtttgagctgagcatttccgtcctgcctgataagtatcaggttatggtgaatggccagtccagctacacattcgaccatcggatcaaaccagaagccgtgaagatggtccaggtctggagagatatcagtctgaccaaattcaatgttagctatctgaaacggtag

SEQ ID NO: 290 - DNA, 657 bp, Artificial Sequence
  Description of Artificial Sequence: Synthetic Transcript Sequence
atgtcttttgtgggggagaactccggtgtgaagatggggagcgaagactgggaaaaagacgagccgcagtgctgcttagaagacccagccggcagtccactggagcccggccccagcctgcctacaatgaatttcgtgcacactagcccaaaggtcaagaacttaaaccctaaaaaattttcgatccatgaccaggatcataaggtgctcgttctggactcgggtaatctgatcgcagtgcccgacaagaattatattcgtcccgaaattttctttgccctggccagcagcctgtctagcgcctccgcagaaaaggggagtcccattctgcttggggtgagcaaaggggaattttgcctgtattgcgacaaggacaagggacaaagtcacccttcactccagttaaagaaggaaaaactcatgaaattggctgcccaaaaggagtccgcgaggaggcctttcattttttaccgagcacaggtcggctcatggaatatgctggaaagtgccgctcatccgggctggttcatctgcacttcgtgtaattgcaacgaacccgtgggcgtaactgacaagttcgagaacagaaaacatattgaattttccttccagccagtatgcaaagccgaaatgagtccaagcgaagtgtctgattag

SEQ ID NO: 291 - DNA, 579 bp, Artificial Sequence
  Description of Artificial Sequence: Synthetic Transcript Sequence
atgtccggttgtgacagaagggaaactgaaaccaaaggaaaaaatagctttaagaaacggttacgcggacctaaggtgaagaatctcaatccaaagaaattcagcattcacgatcaggaccataaggtcctcgttctggactccggtaatctgattgctgtccctgacaagaactacatccggcctgagatcttcttcgccctggcttcatctcttagttcagccagcgccgaaaaaggctctcccattttgctaggagtgtctaagggagaattctgtctgtactgtgataaagacaaaggccaatcacacccttcgctccagttaaagaaagaaaaattaatgaagctggccgcacaaaaggagtccgcacgccgcccgtttatcttttatagggcacaggtcgggtcctggaatatgctagaatcagcagctcaccccggttggttcatctgtacatcttgtaattgtaatgagcccgtcggcgtaaccgataagtttgaaaaccgcaagcatattgaattctcattccagccagtatgcaaggcggaaatgtcgcccagtgaggtgtccgattag

SEQ ID NO: 292 - DNA, 474 bp, Artificial Sequence
  Description of Artificial Sequence: Synthetic Transcript Sequence
atgtctttcgtcggtgaaaattccggggtgaagatgggttcggaagactgggaaaaggatgaaccacagtgctgcctggaagaaattttctttgctctggcatcttctttatccagtgcatccgctgagaaagggagcccgatcctcctcggcgtttctaaaggagagttttgtctgtactgcgataaagacaaaggacagagtcatccctcattacaactgaaaaaagaaaagctgatgaagttagccgcccagaaggaatccgcgaggcgtcccttcatattctatagagcccaggttggctcttggaatatgcttgagagcgcagcacatccagggtggttcatctgtacatcttgcaactgtaacgagcccgtgggcgtcacagataaatttgaaaaccggaagcacattgaattctcctttcagcccgtgtgtaaggccgagatgtcgccttctgaagtctccgattag

SEQ ID NO: 293 - DNA, 594 bp, Artificial Sequence
  Description of Artificial Sequence: Synthetic Transcript Sequence
atgagctttgtcggtgaaaacagcggagtcaagatgggctccgaagactgggaaaaagacgaacctcagtgctgcctcgaaggtccaaaggtcaaaaatttaaatcccaaaaaatttagcattcacgaccaggatcataaagtgcttgtcctcgactcgggaaacctgatcgcagtccccgataaaaattacattcggcctgaaatcttttttgccttagctagctcactcagttcagcctccgccgagaaggggtccccaattctacttggagtgtcgaagggtgagttctgcttatattgcgacaaggacaaggggcagagccatccctcactgcagttaaaaaaggagaaactgatgaaactagcagcccaaaaggagagcgcgcgcaggcccttcatcttctaccgagcgcaggtcggatcttggaacatgctggaatctgccgctcatcccggatggttcatttgcacatcctgcaactgcaatgagccggtcggtgtaacagacaaattcgaaaaccgtaaacatatcgagttctcctttcaacccgtgtgcaaagccgagatgagcccctctgaggtgtccgactag

SEQ ID NO: 294 - DNA, 537 bp, Artificial Sequence
  Description of Artificial Sequence: Synthetic Transcript Sequence
atgtctttcgtgggcgagaattcgggcgtgaagatgggttccgaagactgggagaaagatgaacctcagtgctgtttggaggaccccgcagggagcccccttgaacccggtcccagcctacccaccatgaacttcgtacacactaagatattcttcgccctggcttcctccctttcatcagccagcgcagagaagggctcacccattctcctgggcgtgtcgaaaggcgagttttgcctgtactgcgataaggacaaaggccagagtcatccgagcctccaactcaagaaagaaaagctgatgaagctggctgcccagaaggagtcagcccgaaggccatttatattctaccgagctcaggtcggatcgtggaatatgctcgaaagcgccgcccatccagggtggttcatttgcacctcctgtaattgcaacgagcctgttggggtgaccgacaagttcgagaaccggaagcacatcgagtttagtttccagcctgtttgcaaggcagagatgagccctagtgaggtttccgattag

SEQ ID NO: 295 - DNA, 1344 bp, Artificial Sequence
  Description of Artificial Sequence: Synthetic Transcript Sequence
atgatccccaccttcacggctctcctgtgcctaggcctttctctgggacctaggacacacatgcaggcaggccctctgccgaagccaaccctgtgggccgaacccggctccgtgatcagctggggaaactccgtcactatctggtgccagggtacactggaagcaagagagtaccgcctggacaaggaagagtcacccgctccttgggaccgacagaaccccctggaaccaaaaaacaaagcccggttcagtatcccgagcatgacagaagattacgccggaaggtatcggtgttattacagatccccagtaggctggtcgcaaccatccgaccccctggagttagtgatgaccggcgcctattcaaagccaactttgtccgctttaccttctcctctggtaacgtcgggaaaaagcgttaccctcctgtgtcagtcacgaagtccaatggacaccttcctgttgatcaaggaacgtgcagctcatcctctgttgcacttgcgcagcgaacacggggcgcagcagcaccaggcagagtttccgatgtccccagtgacctccgttcatggggggacatacaggtgctttagttctcatggcttctctcactacttgttatctcatccgagtgacccactggaactgatcgtatcagggtcactggaggatcctcggccatctcccacacgtagcgtaagcactgccgcaggtccagaggaccaacctctaatgccgacgggtagcgtgcctcattccggactgaggcggcactgggaagtgctgatcggggttctggtggtatccattttgctcctgtccctccttctgtttctgctgcttcaacattggaggcagggaaagcaccggaccctggcccagaggcaagcggatttccagaggcctccaggggctgcagagcctgagccgaaagatggcggcttgcagcgtagaagctcgcccgccgccgacgttcagggcgagaatttttgtgccgctgtaaagaacactcagcccgaagatggagtggagatggacacgcggtcgccccacgatgaagatcctcaggccgttacttacgcgaaggtgaaacacagtaggccaaggcgcgagatggcctcaccgccaagccccttgtccggggagtttctggacacaaaagataggcaggcagaggaagatcgtcagatggacactgaagctgctgcttccgaagctccacaggacgtgacttatgcacaattgcattcatttactctgaggcagaaagctactgaaccgccaccaagtcaggaaggagcttcacctgcagaacccagtgtgtacgctacccttgccatccactag

SEQ ID NO: 296 - DNA, 636 bp, Artificial Sequence
  Description of Artificial Sequence: Synthetic Transcript Sequence
atggtcgcgcataaccaagtggccgctgacaacgcagtgtcaaccgcggccgagcccagacgtcggcccgaaccctcctcaagtagttccagtagcccagcggctcccgcccgcccccgtccctgcccggccgtgccggccccagcgcccggggatactcactttagaacattcaggagtcatgctgactacagacgcatcactagggccagcgctctgctggatgcatgtggattttactggggtccattgagtgtgcatggcgcccatgaacgccttagggccgagcccgttgggacctttctggtaagagacagtcgacaaaggaattgctttttcgccctcagcgtgaaaatggcctcaggtcctacttccattcgcgtacactttcaggctggcaggttccaccttgatggatcgagagagtcattcgattgtcttttcgagctgcttgagcactatgtggcagctccacggaggatgctgggcgctcctcttagacagcggagagtgcgacctttacaggagctgtgcaggcaaagaatcgtcgccacagtgggcagagagaatctggccagaatcccattgaatcccgtgctgagggattatctgagcagtttcccattccagatttag

SEQ ID NO: 297 - DNA, 1596 bp, Artificial Sequence
  Description of Artificial Sequence: Synthetic Transcript Sequence
atggccgccaccctggacttaaagtccaaggaggaaaaagacgccgagctagataagcgcatcgaggctctgcgaagaaagaatgaggcgttgattagacggtaccaggagattgaagaggaccggaaaaaggccgagcttgaaggcgtggccgtgacggcccctaggaaggggagaagtgttgagaaggaaaacgtggccgtcgaaagcgaaaagaatctgggacccagccggcggtctcccggcacaccccgcccaccgggcgcgtccaagggaggtcgaactcccccacagcagggtggacgtgcaggtatgggccgagcgagtagaagctgggagggctcccccggcgagcaaccgcgaggtggcggcgcgggagggcggggtcgaagaggaagaggtcgcggaagtccccacttgtctggcgccggcgacacatccattagtgacagaaagtccaaggagtgggaggaacgcaggcgtcagaacatagaaaagatgaacgaggaaatggaaaagattgctgaatacgaacgcaatcaacgggaaggcgtcctggaaccaaatcctgtgcgcaacttccttgatgatcctagacgccgttcaggcccgttggaagaaagtgagcgggatagaagggaggagtccaggcgccacggtcgtaactggggcggccccgacttcgagagggtgagatgcgggctcgaacacgaaaggcaaggaagaagggccggcttaggatcagccggtgacatgacactgtctatgaccggcagagagaggagtgagtatttgaggtggaaacaggagcgagaaaagattgaccaggagaggctgcagcgccatagaaaaccaaccggacagtggcgccgagaatgggatgccgaaaagacagacggcatgttcaaggacgggcccgtgcctgcccatgagccctcccacagatatgacgatcaggcttgggctagaccccccaagccaccaacgtttggtgagtttctgagccagcacaaggcggaggcgtcgagccgtcgaagaaggaagagctcccgccctcaggctaaagccgctcctagggcttactcagatcacgacgatcgctgggaaacaaaagaaggagcagccagtccagcgccagagacgccgcagccgacctccccggaaacatccccaaaggagacgccgatgcaacctcccgaaattcccgctcccgctcacagaccaccggaagacgagggtgaggaaaatgagggtgaagaggatgaggagtgggaagatatatccgaggacgaggaggaagaagagattgaagtggaggagggagatgaggaggagcctgctcaggatcatcaggccccagaggccgcccctaccggaatcccatgtagcgaacaagctcatggcgtgcccttctcaccggaggagccgctgctcgaaccacaggcgccgggaaccccaagcagtccgttctctcctccctctgggcaccagccagtcagcgactggggagaggaagtggagctgaacagccctagaactacacacctggctggggcgctctcccccggggaggcatggccgtttgaaagcgtctag

SEQ ID NO: 298 - DNA, 531 bp, Artificial Sequence
  Description of Artificial Sequence: Synthetic Transcript Sequence
atgaggatctttgctgtgttcatcttcatgacctactggcacctgctgaatgccccctacaacaagatcaaccagaggatcctggtggtggaccctgtgaccagcgagcacgagctgacctgccaggccgagggctaccccaaggccgaggtgatctggaccagcagtgaccaccaggtgctgagcggcaagaccaccaccaccaacagcaagcgggaggagaagctgttcaacgtgaccagcaccctgcgcatcaacaccaccaccaatgagatcttctactgcaccttccggcggctggaccctgaggagaaccacacagctgagctggtgattcctgagctgcccctggcccaccccccaaatgaaagaacccacctggtgatcctgggcgccatcctgctgtgcctgggcgtggccctgaccttcatcttccggctgaggaaaggaaggatgatggatgtgaagaagtgtggcatccaggacaccaacagcaagaagcagagcgacacccacctggaggagacctag

SEQ ID NO: 299 - DNA, 873 bp, Artificial Sequence
  Description of Artificial Sequence: Synthetic Transcript Sequence
atgaggatctttgctgtgttcatcttcatgacctactggcacctgctgaatgccttcaccgtgacagtgcccaaggacctgtatgtggtggagtatggcagcaacatgaccatcgagtgcaagtttcctgtggagaagcagctggacctggccgccctgattgtgtactgggagatggaggacaagaacatcatccagtttgtgcatggagaggaggacctgaaggtgcagcacagcagctaccggcagagggcccggctgctgaaggaccagctgagcctgggcaatgctgccctgcagatcacagatgtgaagctgcaggatgctggggtgtaccgctgcatgatctcctatggaggagctgactacaagaggatcaccgtgaaggtgaatgccccctacaacaagatcaaccagaggatcctggtggtggaccctgtgaccagcgagcacgagctgacctgccaggccgagggctaccccaaggccgaggtgatctggaccagcagtgaccaccaggtgctgagcggcaagaccaccaccaccaacagcaagcgggaggagaagctgttcaacgtgaccagcaccctgcgcatcaacaccaccaccaatgagatcttctactgcaccttccggcggctggaccctgaggagaaccacacagctgagctggtgattcctgagctgcccctggcccaccccccaaatgaaagaacccacctggtgatcctgggcgccatcctgctgtgcctgggcgtggccctgaccttcatcttccggctgaggaaaggaaggatgatggatgtgaagaagtgtggcatccaggacaccaacagcaagaagcagagcgacacccacctggaggagacctag

SEQ ID NO: 300 - DNA, 612 bp, Artificial Sequence
  Description of Artificial Sequence: Synthetic Transcript Sequence
atggtgcggctgcccctgcagtgtgtgctgtggggctgcctgctgacagctgtgcaccctgagcccccaacagcctgccgggagaagcagtacctgatcaacagccagtgctgcagcctgtgccagcccggccagaagctggtgtctgactgcacagagttcacagaaacagagtgcctgccctgtggggagagcgagttcctggacacctggaaccgggagacccactgccaccagcacaagtactgtgaccccaacctgggcctgcgggtgcagcagaagggcaccagcgagacagacaccatctgcacctgtgaggagggctggcactgcaccagcgaggcctgtgagagctgtgtgctgcacaggagctgcagccctggctttggagtgaagcagatcgccaccggggtgtctgacaccatctgtgagccctgccctgtgggcttcttcagcaatgtgagcagcgcctttgagaagtgccacccctggaccaggagccctggcagcgctgagagccctggaggagacccccaccacctgcgggaccctgtgtgccaccccctgggcgccggcctgtaccagaagggcggccaggaggccaaccagtag

SEQ ID NO: 301 - DNA, 786 bp, Artificial Sequence
  Description of Artificial Sequence: Synthetic Transcript Sequence
ggccgcagccccctgcggacccgggacagagtgctgaccaactgggaggatggcctgactgtggcctatggagctgtgaagctgatccagagcctgagcctgcagcctgtgggctggcagcagaactggggcctgagcagcccccccaccatgctgctgcccagccgggcccagagccccacagagctgcccctggcccccctggccgagcccaacacaggctgcagcagcctgctgtcctggcacagcaccagaggagagctgcacctgtgggccctgggcctgggccagatgggcggcagcaaatgtggcagccccctgagccccctggcccccaccctggaggccctgcggcggccctggtgtggccagcagggcgccggcggcacccggggcatcagcacagatcctccttctggaaaaggaggccgggcctggggccgggaccccctgccccgggagggcctgctgcggggcacagctgccccagctgctggaggagacctgaccccctgcctgagccggccccccacccccagcaggaacccccggcgcagcatcttccccaccatcttcctggcccccaccctgctgctgcagtgccggcggctgtacatggatgccaacagaagccccaggaggatggccaagagggtggccagccagtgccggcgggacagcgaggccgcccccacccaggagtgtggccacgtgggcaagcaggccgtgggccagagggcctggtgctgctgctgctgcggcgtgcgggtgcggggctggcactag

SEQ ID NO: 302 - DNA, 834 bp, Artificial Sequence
  Description of Artificial Sequence: Synthetic Transcript Sequence
atggtgcggctgcccctgcagtgtgtgctgtggggctgcctgctgacagctgtgcaccctgagcccccaacagcctgccgggagaagcagtacctgatcaacagccagtgctgcagcctgtgccagcccggccagaagctggtgtctgactgcacagagttcacagaaacagagtgcctgccctgtggggagagcgagttcctggacacctggaaccgggagacccactgccaccagcacaagtactgtgaccccaacctgggcctgcgggtgcagcagaagggcaccagcgagacagacaccatctgcacctgtgaggagggctggcactgcaccagcgaggcctgtgagagctgtgtgctgcacaggagctgcagccctggctttggagtgaagcagatcgccaccggggtgtctgacaccatctgtgagccctgccctgtgggcttcttcagcaatgtgagcagcgcctttgagaagtgccacccctggaccagctgtgagaccaaggacctggtggtgcagcaggccggcaccaacaagacagatgtggtgtgtggcccccaggaccggctgcgggccctggtggtgatccccatcatcttcggcatcctgtttgccatcctgctggtgctggtgttcatcaagaaggtggccaagaagcccaccaacaaggccccccaccccaagcaggagccccaggagatcaacttcccagatgacctgcccggcagcaacacagctgcccctgtgcaggagaccctgcacggctgccagcctgtgacccaggaggatggcaaggagagccgcatctctgtgcaggagcggcagtag

SEQ ID NO: 303 - DNA, 723 bp, Artificial Sequence
  Description of Artificial Sequence: Synthetic Transcript Sequence
atgattgagacctacaaccagaccagccccaggtctgctgccaccggcctgcccatctccatgaagatcttcatgtacctgctgactgtgttcctgatcacccagatgattggcagcgccctgtttgctgtgtacctgcaccggcggctggacaagattgaagatgaaagaaacctgcatgaagattttgtgttcatgaagaccatccagcgctgcaacacaggagagaggagcctgagcctgctgaactgtgaggagatcaagagccagtttgagggctttgtgaaggacatcatgctgaacaaggaggagaccaagaaggagaacagctttgagatgcagaaggtgctgcagtgggccgagaagggctactacaccatgagcaacaacctggtgaccctggagaatggcaagcagctgactgtgaagaggcagggcctgtactacatctatgcccaggtgaccttctgcagcaaccgggaggccagcagccaggcccccttcatcgccagcctgtgcctgaagagccctggccgctttgagcgcatcctgctgcgggccgccaacacccacagcagcgccaagccctgtggccagcagagcatccacctgggcggcgtgtttgagctgcagcccggggcctctgtgtttgtgaatgtgacagaccccagccaggtgagccacggcaccggcttcaccagctttggcctgctgaagctgtag

SEQ ID NO: 304 - DNA, 786 bp, Artificial Sequence
  Description of Artificial Sequence: Synthetic Transcript Sequence
atgattgagacctacaaccagaccagccccaggtctgctgccaccggcctgcccatctccatgaagatcttcatgtacctgctgactgtgttcctgatcacccagatgattggcagcgccctgtttgctgtgtacctgcaccggcggctggacaagattgaagatgaaagaaacctgcatgaagattttgtgttcatgaagaccatccagcgctgcaacacaggagagaggagcctgagcctgctgaactgtgaggagatcaagagccagtttgagggctttgtgaaggacatcatgctgaacaaggaggagaccaagaaggagaacagctttgagatgcagaagggggaccagaacccccagattgctgcccacgtgatcagcgaggccagcagcaagaccacctctgtgctgcagtgggccgagaagggctactacaccatgagcaacaacctggtgaccctggagaatggcaagcagctgactgtgaagaggcagggcctgtactacatctatgcccaggtgaccttctgcagcaaccgggaggccagcagccaggcccccttcatcgccagcctgtgcctgaagagccctggccgctttgagcgcatcctgctgcgggccgccaacacccacagcagcgccaagccctgtggccagcagagcatccacctgggcggcgtgtttgagctgcagcccggggcctctgtgtttgtgaatgtgacagaccccagccaggtgtcccatggaacaggcttcaccagctttggcctgctgaagctgtag

SEQ ID NO: 305 - DNA, 5169 bp, Artificial Sequence
  Description of Artificial Sequence: Synthetic Transcript Sequence
atgaggacaggctgggccaccccaagaagacctgctggcctgctgatgctgctcttctggttctttgacctggccgagcccagcggccgggccgccaatgaccccttcaccatcgtgcacggcaacacaggcaagtgcatcaagcctgtgtatggctggatcgtggctgatgactgtgatgaaacagaggacaagctgtggaagtgggtgtcccagcacaggctcttccacctgcacagccagaagtgcctgggcctggacatcaccaagtctgtgaatgagctgaggatgttcagctgtgacagcagcgccatgctgtggtggaagtgtgagcaccacagcctgtatggagctgcccgctaccgcctggccctgaaggatggccatggaacagccatcagcaatgccagtgatgtgtggaagaagggcggcagcgaggagagcctgtgtgaccagccctaccacgagatctacaccagagatggcaacagctatggccggccctgtgagttccccttcctgattgatggcacctggcaccacgactgcatcctggatgaggaccacagcggcccctggtgtgccaccaccctgaactatgaatatgacaggaagtggggcatctgcctgaagccagaaaatggctgtgaggacaactgggagaagaatgagcagtttggcagctgctaccagttcaacacccagacagccctgtcctggaaggaggcctacgtgtcctgccagaaccagggcgctgacctgctgagcatcaacagcgctgctgagctgacctacctgaaggagaaggagggcatcgccaagatcttctggattggcctgaaccagctgtacagcgcccggggctgggagtggagcgaccacaagcccctgaacttcctgaactgggaccctgaccggcccagcgcccccaccatcggcggcagcagctgtgccaggatggatgctgagagcggcctgtggcagagcttcagctgtgaggcccagctgccctacgtgtgcaggaagcccctgaacaacacagtggagctgacagatgtgtggacctacagcgacacccgctgtgatgctggctggctgcccaacaacggcttctgctacctgctggtgaatgaaagcaacagctgggacaaggcccacgccaagtgcaaggccttcagcagtgacctgatcagcatccacagcctggctgatgtggaggtggtggtgaccaagctgcacaatgaagacatcaaggaggaggtgtggattggcctgaagaacatcaacatccccaccctcttccagtggagcgatggaacagaggtgaccctgacctactgggatgaaaatgagcccaacgtgccctacaacaagacccccaactgtgtgtcctacctgggggagctgggccagtggaaggtgcagagctgtgaggagaagctgaagtatgtgtgcaagaggaagggggagaagctgaatgatgccagcagtgacaagatgtgccccccagatgagggctggaagagacatggagagacctgctacaagatctatgaagatgaggtgcccttcggcaccaactgcaacctgaccatcaccagcagatttgagcaggagtacctgaatgacctgatgaagaagtatgacaagagcctgaggaagtacttctggacaggcctgagagatgtggacagctgtggggagtacaactgggccaccgtgggcggcagaagaagagctgtgaccttcagcaactggaacttcctggagcccgccagccctgggggctgtgtggccatgagcacaggcaagtctgtgggcaagtgggaggtgaaggactgccgctccttcaaggccctgagcatctgcaagaagatgagcggccccctgggccctgaggaggccagccccaagccagatgacccctgcccagagggctggcagagcttccctgccagcctgagctgctacaaggtgttccacgccgagagaattgtgaggaagaggaactgggaggaggccgagcgcttctgccaggccctgggcgcccacctgagcagcttcagccacgtggatgagatcaaggagttcctgcacttcctgacagaccagttcagcggccagcactggctgtggattggcctgaacaagaggagcccagacctgcagggctcctggcagtggagcgacaggacccctgtgtccaccatcatcatgcccaatgagttccagcaggactatgacatccgggactgtgccgctgtgaaggtgttccaccggccctggaggcggggctggcacttctatgatgaccgggagttcatctacctgcggccctttgcctgtgacaccaagctggagtgggtgtgccagatccccaagggccgcacccccaagaccccagactggtacaacccagacagagctggcatccacggccccccactcatcatcgagggcagcgagtactggtttgtggccgacctgcacctgaactatgaggaggccgtgctgtactgtgccagcaaccacagcttcctggccaccatcaccagctttgtgggcctgaaggccatcaagaacaagatcgccaacatctctggagatggccagaagtggtggatccgcatcagcgagtggcccattgatgaccacttcacctacagccgctacccctggcaccgcttccctgtgaccttcggggaggagtgcctgtacatgtctgccaagacctggctgattgacctgggcaagcccacagactgcagcaccaagctgcccttcatctgtgagaagtacaacgtgagcagcctggagaagtacagcccagattctgctgccaaggtgcagtgcagcgagcagtggatccccttccagaacaagtgcttcctgaagatcaagcctgtgtccctgaccttcagccaggccagtgacacctgccacagctatggaggcaccctgcccagcgtgctgagccagatcgagcaggacttcatcaccagcctgctgcctgacatggaggccaccctgtggattggcctgcgctggacagcctatgagaagatcaacaagtggacagacaaccgggagctgacctacagcaacttccaccccctgctggtgtctggccgcctgcgcatccctgagaacttctttgaggaggagagccgctaccactgtgccctgatcctgaacctgcagaagagccccttcaccggcacctggaacttcaccagctgcagcgagcggcactttgtgtccctgtgccagaagtacagcgaggtgaagagccggcagaccctgcagaatgccagcgagaccgtgaagtacctgaacaacctgtacaagatcatccccaagaccctgacctggcacagcgccaagcgggagtgcctgaagagcaacatgcagctggtgtccatcacagacccctaccagcaggccttcctgtctgtgcaggccctgctgcacaacagcagcctgtggattggcctcttcagccaggatgatgagctgaactttggctggagcgatggcaagaggctgcacttcagccgctgggccgagaccaacggccagctggaggactgtgtggtgctggacacagatggcttctggaagacagtggactgcaatgacaaccagcccggggccatctgctactacagcggaaatgaaacagagaaggaggtgaagcctgtggacagcgtgaagtgccccagccctgtgctgaacaccccctggatccccttccagaactgctgctacaacttcatcatcaccaagaacagacacatggccaccacccaggatgaggtgcacaccaagtgccagaagctgaaccccaagagccacatcctgagcatcagagatgagaaggagaacaactttgtgctggagcagctgctgtacttcaactacatggcctcctgggtgatgctgggcatcacctacagaaacaagagcctgatgtggtttgacaagacccccctgagctacacccactggagggctggccggcccaccatcaagaatgagaagttcctggccggcctgagcacagatggcttctgggacatccagaccttcaaggtgattgaggaggccgtgtacttccaccagcacagcatcctggcctgcaagattgagatggtggactacaaggaggagtacaacaccaccctgccccagttcatgccctatgaagatggcatctacagcgtcatccagaagaaggtgacctggtatgaggccctgaacatgtgcagccagagcggcggccacctggcctctgtgcacaaccagaatggccagctgttcctggaggacatcgtgaagagagatggcttccccctgtgggtgggcctgagcagccatgatggcagcgagagcagctttgagtggagcgatggcagcacctttgactacatcccctggaagggccagaccagccctggcaactgtgtgctgctggaccccaagggcacctggaagcatgagaagtgcaacagcgtgaaggatggagccatctgctacaagcccaccaagagcaagaagctgagccggctgacctacagcagccgctgcccagctgccaaggaaaatggcagccgctggatccagtacaagggccactgctacaagagtgaccaggccctgcacagcttcagcgaggccaagaagctgtgcagcaagcatgaccacagcgccaccatcgtgtccatcaaggatgaagatgagaacaagtttgtgtcccggctgatgagggagaacaacaacatcaccatgagggtgtggctgggcctgagccagcacagcgtggaccagagctggagctggctggatggcagcgaggtgacctttgtgaagtgggagaacaagagcaagagcggcgtgggccgctgcagcatgctgattgccagcaatgagacctggaagaaggtggagtgtgagcacggcttcggccgggtggtgtgcaaggtgcccctgggccctgactacacagccatcgccatcatcgtggccaccctgagcatcctggtgctgatgggcggcctcatctggttcctgttccagaggcaccggctgcacctggccggcttcagctctgtgcgctatgcccagggcgtgaatgaagatgagatcatgctgcccagcttccatgactag

SEQ ID NO: 306 - DNA, 5454 bp, Artificial Sequence
  Description of Artificial Sequence: Synthetic Transcript Sequence
atgaggacaggctgggccaccccaagaagacctgctggcctgctgatgctgctcttctggttctttgacctggccgagcccagcggccgggccgccaatgaccccttcaccatcgtgcacggcaacacaggcaagtgcatcaagcctgtgtatggctggatcgtggctgatgactgtgatgaaacagaggacaagctgtggaagtgggtgtcccagcacaggctcttccacctgcacagccagaagtgcctgggcctggacatcaccaagtctgtgaatgagctgaggatgttcagctgtgacagcagcgccatgctgtggtggaagtgtgagcaccacagcctgtatggagctgcccgctaccgcctggccctgaaggatggccatggaacagccatcagcaatgccagtgatgtgtggaagaagggcggcagcgaggagagcctgtgtgaccagccctaccacgagatctacaccagagatggcaacagctatggccggccctgtgagttccccttcctgattgatggcacctggcaccacgactgcatcctggatgaggaccacagcggcccctggtgtgccaccaccctgaactatgaatatgacaggaagtggggcatctgcctgaagccagaaaatggctgtgaggacaactgggagaagaatgagcagtttggcagctgctaccagttcaacacccagacagccctgtcctggaaggaggcctacgtgtcctgccagaaccagggcgctgacctgctgagcatcaacagcgctgctgagctgacctacctgaaggagaaggagggcatcgccaagatcttctggattggcctgaaccagctgtacagcgcccggggctgggagtggagcgaccacaagcccctgaacttcctgaactgggaccctgaccggcccagcgcccccaccatcggcggcagcagctgtgccaggatggatgctgagagcggcctgtggcagagcttcagctgtgaggcccagctgccctacgtgtgcaggaagcccctgaacaacacagtggagctgacagatgtgtggacctacagcgacacccgctgtgatgctggctggctgcccaacaacggcttctgctacctgctggtgaatgaaagcaacagctgggacaaggcccacgccaagtgcaaggccttcagcagtgacctgatcagcatccacagcctggctgatgtggaggtggtggtgaccaagctgcacaatgaagacatcaaggaggaggtgtggattggcctgaagaacatcaacatccccaccctcttccagtggagcgatggaacagaggtgaccctgacctactgggatgaaaatgagcccaacgtgccctacaacaagacccccaactgtgtgtcctacctgggggagctgggccagtggaaggtgcagagctgtgaggagaagctgaagtatgtgtgcaagaggaagggggagaagctgaatgatgccagcagtgacaagatgtgccccccagatgagggctggaagagacatggagagacctgctacaagatctatgaagatgaggtgcccttcggcaccaactgcaacctgaccatcaccagcagatttgagcaggagtacctgaatgacctgatgaagaagtatgacaagagcctgaggaagtacttctggacaggcctgagagatgtggacagctgtggggagtacaactgggccaccgtgggcggcagaagaagagctgtgaccttcagcaactggaacttcctggagcccgccagccctgggggctgtgtggccatgagcacaggcaagtctgtgggcaagtgggaggtgaaggactgccgctccttcaaggccctgagcatctgcaagaagatgagcggccccctgggccctgaggaggccagccccaagccagatgacccctgcccagagggctggcagagcttccctgccagcctgagctgctacaaggtgttccacgccgagagaattgtgaggaagaggaactgggaggaggccgagcgcttctgccaggccctgggcgcccacctgagcagcttcagccacgtggatgagatcaaggagttcctgcacttcctgacagaccagttcagcggccagcactggctgtggattggcctgaacaagaggagcccagacctgcagggctcctggcagtggagcgacaggacccctgtgtccaccatcatcatgcccaatgagttccagcaggactatgacatccgggactgtgccgctgtgaaggtgttccaccggccctggaggcggggctggcacttctatgatgaccgggagttcatctacctgcggccctttgcctgtgacaccaagctggagtgggtgtgccagatccccaagggccgcacccccaagaccccagactggtacaacccagacagagctggcatccacggccccccactcatcatcgagggcagcgagtactggtttgtggccgacctgcacctgaactatgaggaggccgtgctgtactgtgccagcaaccacagcttcctggccaccatcaccagctttgtgggcctgaaggccatcaagaacaagatcgccaacatctctggagatggccagaagtggtggatccgcatcagcgagtggcccattgatgaccacttcacctacagccgctacccctggcaccgcttccctgtgaccttcggggaggagtgcctgtacatgtctgccaagacctggctgattgacctgggcaagcccacagactgcagcaccaagctgcccttcatctgtgagaagtacaacgtgagcagcctggagaagtacagcccagattctgctgccaaggtgcagtgcagcgagcagtggatccccttccagaacaagtgcttcctgaagatcaagcctgtgtccctgaccttcagccaggccagtgacacctgccacagctatggaggcaccctgcccagcgtgctgagccagatcgagcaggacttcatcaccagcctgctgcctgacatggaggccaccctgtggattggcctgcgctggacagcctatgagaagatcaacaagtggacagacaaccgggagctgacctacagcaacttccaccccctgctggtgtctggccgcctgcgcatccctgagaacttctttgaggaggagagccgctaccactgtgccctgatcctgaacctgcagaagagccccttcaccggcacctggaacttcaccagctgcagcgagcggcactttgtgtccctgtgccagaagtacagcgaggtgaagagccggcagaccctgcagaatgccagcgagaccgtgaagtacctgaacaacctgtacaagatcatccccaagaccctgacctggcacagcgccaagcgggagtgcctgaagagcaacatgcagctggtgtccatcacagacccctaccagcaggccttcctgtctgtgcaggccctgctgcacaacagcagcctgtggattggcctcttcagccaggatgatgagctgaactttggctggagcgatggcaagaggctgcacttcagccgctgggccgagaccaacggccagctggaggactgtgtggtgctggacacagatggcttctggaagacagtggactgcaatgacaaccagcccggggccatctgctactacagcggaaatgaaacagagaaggaggtgaagcctgtggacagcgtgaagtgccccagccctgtgctgaacaccccctggatccccttccagaactgctgctacaacttcatcatcaccaagaacagacacatggccaccacccaggatgaggtgcacaccaagtgccagaagctgaaccccaagagccacatcctgagcatcagagatgagaaggagaacaactttgtgctggagcagctgctgtacttcaactacatggcctcctgggtgatgctgggcatcacctacagaaacaagagcctgatgtggtttgacaagacccccctgagctacacccactggagggctggccggcccaccatcaagaatgagaagttcctggccggcctgagcacagatggcttctgggacatccagaccttcaaggtgattgaggaggccgtgtacttccaccagcacagcatcctggcctgcaagattgagatggtggactacaaggaggagtacaacaccaccctgccccagttcatgccctatgaagatggcatctacagcgtcatccagaagaaggtgacctggtatgaggccctgaacatgtgcagccagagcggcggccacctggcctctgtgcacaaccagaatggccagctgttcctggaggacatcgtgaagagagatggcttccccctgtgggtgggcctgagcagccatgatggcagcgagagcagctttgagtggagcgatggcagcacctttgactacatcccctggaagggccagaccagccctggcaactgtgtgctgctggaccccaagggcacctggaagcatgagaagtgcaacagcgtgaaggatggagccatctgctacaagcccaccaagagcaagaagctgagccggctgacctacagcagccgctgcccagctgccaaggaaaatggcagccgctggatccagtacaagggccactgctacaagagtgaccaggccctgcacagcttcagcgaggccaagaagctgtgcagcaagcatgaccacagcgccaccatcgtgtccatcaaggatgaagatgagaacaagtttgtgtcccggctgatgagggagaacaacaacatcaccatgagggtgtggctgggcctgagccagcacagcgtggactgccccagcagcacctggatccagttccaggacagctgctacatcttcctgcaggaggccatcaaggtggagagcattgaagatgtgaggaaccagtgcacagaccacggggctgacatgatcagcatccacaatgaggaggagaatgccttcatcctggacaccctgaagaagcagtggaagggcccagatgacatcctgctgggcatgttttatgacacagatgatgccagcttcaagtggtttgacaacagcaacatgacctttgacaagtggacagaccaggatgatgatgaggacctggtggacacctgtgccttcctgcacatcaagacaggagagtggaagaagggcaactgtgaggtgtcctctgtggagggcaccctgtgcaagacagccatcccctacaagaggaagtacctgagtgacaaccacatcctgatcagcgccctggtgattgccagcaccgtcatcctgactgtgctgggcgccatcatctggttcctgtacaagaagcacagcgacagccgcttcaccaccgtcttcagcacagccccccagagcccctacaatgaagactgtgtgctggtggtgggggaggagaatgagtaccctgtgcagtttgattag

SEQ ID NO: 307 - DNA, 5622 bp, Artificial Sequence
  Description of Artificial Sequence: Synthetic Transcript Sequence
atgaggacaggctgggccaccccaagaagacctgctggcctgctgatgctgctcttctggttctttgacctggccgagcccagcggccgggccgccaatgaccccttcaccatcgtgcacggcaacacaggcaagtgcatcaagcctgtgtatggctggatcgtggctgatgactgtgatgaaacagaggacaagctgtggaagtgggtgtcccagcacaggctcttccacctgcacagccagaagtgcctgggcctggacatcaccaagtctgtgaatgagctgaggatgttcagctgtgacagcagcgccatgctgtggtggaagtgtgagcaccacagcctgtatggagctgcccgctaccgcctggccctgaaggatggccatggaacagccatcagcaatgccagtgatgtgtggaagaagggcggcagcgaggagagcctgtgtgaccagccctaccacgagatctacaccagagatggcaacagctatggccggccctgtgagttccccttcctgattgatggcacctggcaccacgactgcatcctggatgaggaccacagcggcccctggtgtgccaccaccctgaactatgaatatgacaggaagtggggcatctgcctgaagccagaaaatggctgtgaggacaactgggagaagaatgagcagtttggcagctgctaccagttcaacacccagacagccctgtcctggaaggaggcctacgtgtcctgccagaaccagggcgctgacctgctgagcatcaacagcgctgctgagctgacctacctgaaggagaaggagggcatcgccaagatcttctggattggcctgaaccagctgtacagcgcccggggctgggagtggagcgaccacaagcccctgaacttcctgaactgggaccctgaccggcccagcgcccccaccatcggcggcagcagctgtgccaggatggatgctgagagcggcctgtggcagagcttcagctgtgaggcccagctgccctacgtgtgcaggaagcccctgaacaacacagtggagctgacagatgtgtggacctacagcgacacccgctgtgatgctggctggctgcccaacaacggcttctgctacctgctggtgaatgaaagcaacagctgggacaaggcccacgccaagtgcaaggccttcagcagtgacctgatcagcatccacagcctggctgatgtggaggtggtggtgaccaagctgcacaatgaagacatcaaggaggaggtgtggattggcctgaagaacatcaacatccccaccctcttccagtggagcgatggaacagaggtgaccctgacctactgggatgaaaatgagcccaacgtgccctacaacaagacccccaactgtgtgtcctacctgggggagctgggccagtggaaggtgcagagctgtgaggagaagctgaagtatgtgtgcaagaggaagggggagaagctgaatgatgccagcagtgacaagatgtgccccccagatgagggctggaagagacatggagagacctgctacaagatctatgaagatgaggtgcccttcggcaccaactgcaacctgaccatcaccagcagatttgagcaggagtacctgaatgacctgatgaagaagtatgacaagagcctgaggaagtacttctggacaggcctgagagatgtggacagctgtggggagtacaactgggccaccgtgggcggcagaagaagagctgtgaccttcagcaactggaacttcctggagcccgccagccctgggggctgtgtggccatgagcacaggcaagtctgtgggcaagtgggaggtgaaggactgccgctccttcaaggccctgagcatctgcaagaagatgagcggccccctgggccctgaggaggccagccccaagccagatgacccctgcccagagggctggcagagcttccctgccagcctgagctgctacaaggtgttccacgccgagagaattgtgaggaagaggaactgggaggaggccgagcgcttctgccaggccctgggcgcccacctgagcagcttcagccacgtggatgagatcaaggagttcctgcacttcctgacagaccagttcagcggccagcactggctgtggattggcctgaacaagaggagcccagacctgcagggctcctggcagtggagcgacaggacccctgtgtccaccatcatcatgcccaatgagttccagcaggactatgacatccgggactgtgccgctgtgaaggtgttccaccggccctggaggcggggctggcacttctatgatgaccgggagttcatctacctgcggccctttgcctgtgacaccaagctggagtgggtgtgccagatccccaagggccgcacccccaagaccccagactggtacaacccagacagagctggcatccacggccccccactcatcatcgagggcagcgagtactggtttgtggccgacctgcacctgaactatgaggaggccgtgctgtactgtgccagcaaccacagcttcctggccaccatcaccagctttgtgggcctgaaggccatcaagaacaagatcgccaacatctctggagatggccagaagtggtggatccgcatcagcgagtggcccattgatgaccacttcacctacagccgctacccctggcaccgcttccctgtgaccttcggggaggagtgcctgtacatgtctgccaagacctggctgattgacctgggcaagcccacagactgcagcaccaagctgcccttcatctgtgagaagtacaacgtgagcagcctggagaagtacagcccagattctgctgccaaggtgcagtgcagcgagcagtggatccccttccagaacaagtgcttcctgaagatcaagcctgtgtccctgaccttcagccaggccagtgacacctgccacagctatggaggcaccctgcccagcgtgctgagccagatcgagcaggacttcatcaccagcctgctgcctgacatggaggccaccctgtggattggcctgcgctggacagcctatgagaagatcaacaagtggacagacaaccgggagctgacctacagcaacttccaccccctgctggtgtctggccgcctgcgcatccctgagaacttctttgaggaggagagccgctaccactgtgccctgatcctgaacctgcagaagagccccttcaccggcacctggaacttcaccagctgcagcgagcggcactttgtgtccctgtgccagaagtacagcgaggtgaagagccggcagaccctgcagaatgccagcgagaccgtgaagtacctgaacaacctgtacaagatcatccccaagaccctgacctggcacagcgccaagcgggagtgcctgaagagcaacatgcagctggtgtccatcacagacccctaccagcaggccttcctgtctgtgcaggccctgctgcacaacagcagcctgtggattggcctcttcagccaggatgatgagctgaactttggctggagcgatggcaagaggctgcacttcagccgctgggccgagaccaacggccagctggaggactgtgtggtgctggacacagatggcttctggaagacagtggactgcaatgacaaccagcccggggccatctgctactacagcggaaatgaaacagagaaggaggtgaagcctgtggacagcgtgaagtgccccagccctgtgctgaacaccccctggatccccttccagaactgctgctacaacttcatcatcaccaagaacagacacatggccaccacccaggatgaggtgcacaccaagtgccagaagctgaaccccaagagccacatcctgagcatcagagatgagaaggagaacaactttgtgctggagcagctgctgtacttcaactacatggcctcctgggtgatgctgggcatcacctacagaaacaagagcctgatgtggtttgacaagacccccctgagctacacccactggagggctggccggcccaccatcaagaatgagaagttcctggccggcctgagcacagatggcttctgggacatccagaccttcaaggtgattgaggaggccgtgtacttccaccagcacagcatcctggcctgcaagattgagatggtggactacaaggaggagtacaacaccaccctgccccagttcatgccctatgaagatggcatctacagcgtcatccagaagaaggtgacctggtatgaggccctgaacatgtgcagccagagcggcggccacctggcctctgtgcacaaccagaatggccagctgttcctggaggacatcgtgaagagagatggcttccccctgtgggtgggcctgagcagccatgatggcagcgagagcagctttgagtggagcgatggcagcacctttgactacatcccctggaagggccagaccagccctggcaactgtgtgctgctggaccccaagggcacctggaagcatgagaagtgcaacagcgtgaaggatggagccatctgctacaagcccaccaagagcaagaagctgagccggctgacctacagcagccgctgcccagctgccaaggaaaatggcagccgctggatccagtacaagggccactgctacaagagtgaccaggccctgcacagcttcagcgaggccaagaagctgtgcagcaagcatgaccacagcgccaccatcgtgtccatcaaggatgaagatgagaacaagtttgtgtcccggctgatgagggagaacaacaacatcaccatgagggtgtggctgggcctgagccagcacagcgtggaccagagctggagctggctggatggcagcgaggtgacctttgtgaagtgggagaacaagagcaagagcggcgtgggccgctgcagcatgctgattgccagcaatgagacctggaagaaggtggagtgtgagcacggcttcggccgggtggtgtgcaaggtgcccctggactgccccagcagcacctggatccagttccaggacagctgctacatcttcctgcaggaggccatcaaggtggagagcattgaagatgtgaggaaccagtgcacagaccacggggctgacatgatcagcatccacaatgaggaggagaatgccttcatcctggacaccctgaagaagcagtggaagggcccagatgacatcctgctgggcatgttttatgacacagatgatgccagcttcaagtggtttgacaacagcaacatgacctttgacaagtggacagaccaggatgatgatgaggacctggtggacacctgtgccttcctgcacatcaagacaggagagtggaagaagggcaactgtgaggtgtcctctgtggagggcaccctgtgcaagacagccatcccctacaagaggaagtacctgagtgacaaccacatcctgatcagcgccctggtgattgccagcaccgtcatcctgactgtgctgggcgccatcatctggttcctgtacaagaagcacagcgacagccgcttcaccaccgtcttcagcacagccccccagagcccctacaatgaagactgtgtgctggtggtgggggaggagaatgagtaccctgtgcagtttgattag

SEQ ID NO: 308 - DNA, 186 bp, Artificial Sequence
  Description of Artificial Sequence: Synthetic Transcript Sequence
atgaagcgcttcctgttcctgctgctgaccatcagcctgctggtgatggtgcagatccagacaggcctgagcggccagaatgacaccagccagaccagcagccccagcgccagcagcaacatcagcggcggcatcttcctgttctttgtggccaatgccatcatccacctgttctgcttctcctag

SEQ ID NO: 309 - DNA, 1062 bp, Artificial Sequence
  Description of Artificial Sequence: Synthetic Transcript Sequence
atggagctgacagagctgctgctggtggtgatgctgctgctgacagcccggctgaccctgagcagccctgcccccccagcctgtgacctgcgggtgctgagcaagctgctgcgggacagccacgtgctgcacagccggctgagccagtgcccagaggtgcaccccctgcccacccctgtgctgctgcctgctgtggacttcagcctgggggagtggaagacccagatggaggagaccaaggcccaggacatcctgggcgctgtgaccctgctgctggagggcgtgatggccgcccggggccagctgggccccacctgcctgagcagcctgctgggccagctgagcggccaggtgcggctgctgctgggcgccctgcagagcctgctgggcacccagctgcccccccagggccgcaccacagcccacaaggaccccaatgccatcttcctgtccttccagcacctgctgcggggcaaggtgcgcttcctgatgctggtgggcggcagcaccctgtgtgtgcggcgggccccacccaccacagctgtgcccagcaggaccagcctggtgctgaccctgaatgagctgcccaacagaaccagcggcctgctggagaccaacttcaccgccagcgcccggaccaccggcagcggcctgctgaagtggcagcagggcttccgggccaagatccctggcctgctgaaccagaccagccgcagcctggaccagatccctggctacctgaaccgcatccacgagctgctgaatggcacccggggcctcttccctggccccagcaggaggaccctgggcgccccagacatcagcagcggcaccagtgacaccggcagcctgccccccaacctgcagcccggctacagccccagccccacccaccccccaacaggccagtacaccctcttccccctgccccccaccctgcccacccctgtggtgcagctgcaccccctgctgcctgaccccagcgcccccacccccacccccaccagccccctgctgaacaccagctacacccacagccagaacctgagccaggagggctag

SEQ ID NO: 310 - DNA, 537 bp, Artificial Sequence
  Description of Artificial Sequence: Synthetic Transcript Sequence
atgacagtgctggccccagcctggagccccaccacctacctgctgctgctgctgctgctgagcagcggcctgagcggcacccaggactgcagcttccagcacagccccatcagcagtgactttgctgtgaagatccgggagctgagtgactacctgctgcaggactaccctgtgacagtggccagcaacctgcaggatgaggagctgtgtggcggcctgtggaggctggtgctggcccagcgctggatggagcggctgaagacagtggccggcagcaagatgcagggcctgctggagcgggtgaacacagagatccactttgtgaccaagtgtgccttccagcccccacccagctgcctgcgctttgtgcagaccaacatcagccggctgctgcaggagaccagcgagcagctggtggccctgaagccctggatcacccggcagaacttcagccgctgcctggagctgcagtgccagcctgtggagaccgtcttccaccgggtgtcccaggacggcctggacctgctgaccagctag

SEQ ID NO: 311 - DNA, 708 bp, Artificial Sequence
  Description of Artificial Sequence: Synthetic Transcript Sequence
atgacagtgctggccccagcctggagccccaccacctacctgctgctgctgctgctgctgagcagcggcctgagcggcacccaggactgcagcttccagcacagccccatcagcagtgactttgctgtgaagatccgggagctgagtgactacctgctgcaggactaccctgtgacagtggccagcaacctgcaggatgaggagctgtgtggcggcctgtggaggctggtgctggcccagcgctggatggagcggctgaagacagtggccggcagcaagatgcagggcctgctggagcgggtgaacacagagatccactttgtgaccaagtgtgccttccagcccccacccagctgcctgcgctttgtgcagaccaacatcagccggctgctgcaggagaccagcgagcagctggtggccctgaagccctggatcacccggcagaacttcagccgctgcctggagctgcagtgccagcctgacagcagcaccctgcccccaccctggagcccccggcccctggaggccacagcccccacagccccccagccccccctgctgctgctgctgctgctgcctgtgggcctgctgctgctggccgccgcctggtgcctgcactggcagaggaccaggaggaggacccccaggcctggagagcaggtgccccctgtgcccagcccccaggacctgctgctggtggagcactag

SEQ ID NO: 312 - DNA, 1110 bp, Artificial Sequence
  Description of Artificial Sequence: Synthetic Transcript Sequence
atggtgtgggcccccctgggcccccccaggacagactgcctgaccctgctgcacacccccagcaaggacagccccaagatgagcctggagtggctggtggcctggagctggagcctggatggcctgcgggactgcatcgccaccggcatccagagcgtgcgggactgtgacaccacagctgtgatcaccgtggcctgcctgctggtgctgtttgtgtggtactgctaccacgtgggccgggagcagccccggccctacgtgtctgtgaacagcctgatgcaggccgcagatgccaacggcctgcagaatggctacgtgtactgccagagcccagaatgtgtgcgctgcacccacaatgaaggcctgaaccagaagctgtaccacaacctgcaggagtatgccaagcgctacagctggagcggcatgggccgcatccacaagggcatccgggagcagggccgctacctgaacagccggcccagcatccagaagccagaggtgttcttcctgcctgacctgcccaccaccccctacttcagcagagatgcccagaagcatgatgtggaggtgctggagaggaacttccagaccatcctgtgtgaatttgagaccctgtacaaggccttcagcaactgcagcctgccccagggctggaagatgaacagcaccccatctggagagtggttcaccttctacctggtgaaccagggcgtgtgtgtgcccaggaactgcaggaagtgccccaggacctaccgcctgctgggcagcctgcggacctgcatcggcaacaacgtgtttggaaatgcctgcatctctgtgctgagccctggcaccgtcatcacagagcactacggccccaccaacatccgcatccgctgccacctgggcctgaagaccccaaatggctgtgagctggtggtgggcggggagccccagtgctgggccgagggccgctgcctgctgtttgatgacagcttcctgcatgctgccttccacgagggcagcgcagaagatggcccccgggtggtgttcatggtggacctgtggcaccccaacgtggccgctgctgagcggcaggccctggacttcatctttgcccctggaagatag

SEQ ID NO: 313 - DNA, 1989 bp, Artificial Sequence
  Description of Artificial Sequence: Synthetic Transcript Sequence
atgaggccccagatcctgctgctgctggccctgctgaccctgggcctggccgcccagcaccaggacaaggtgccctgcaagatggtggacaagaaggtgtcctgccaggtgctgggcctgctgcaggtgcccagcgtgctgcccccagacacagagaccctggacctgagcggcaaccagctgcggagcatcctggccagccccctgggcttctacacagccctgcggcacctggacctgagcaccaatgagatctccttcctgcagcccggggccttccaggccctgacccacctggagcacctgagcctggcccacaaccggctggccatggccacagccctgtctgctgggggcctgggccccctgccccgggtgaccagcctggacctgagcggcaacagcctgtacagcggcctgctggagcggctgctgggggaggcccccagcctgcacaccctgagcctggccgagaacagcctgacccggctgaccaggcacaccttccgggacatgcctgccctggagcagctggacctgcacagcaatgtgctgatggacattgaagatggagcctttgagggcctgccccggctgacccacctgaacctgagcaggaacagcctgacctgcatcagtgacttcagcctgcagcagctgcgggtgctggacctgagctgcaacagcattgaggccttccagacagccagccagccccaggccgagttccagctgacctggctggacctgcgggagaacaagctgctgcacttcccagacctggccgccctgcccaggctcatctacctgaacctgagcaacaacctgatccggctgcccactggaccaccccaggacagcaagggcatccacgcccccagcgagggctggagcgccctgcccctgagcgcccccagcggaaatgccagcggccggcccctgagccagctgctgaacctggacctgagctacaatgaaattgagctgatcccagacagcttcctggagcacctgaccagcctgtgcttcctgaacctgagcaggaactgcctgcggacctttgaggcccggcggctgggcagcctgccctgcctgatgctgctggacctgagccacaatgccctggagaccctggagctgggcgcccgggccctgggcagcctgcggaccctgctgctgcagggcaatgccctgcgggacctgcccccctacacctttgccaacctggccagcctgcagaggctgaacctgcagggcaacagagtgagcccctgtggcggcccagatgagcccggccccagcggctgtgtggccttcagcggcatcaccagcctgcggagcctgagcctggtggacaatgaaattgagctgctgcgggccggggccttcctgcacacccccctgacagagctggacctgagcagcaaccctggcctggaggtggccactggagccctgggcggcctggaggccagcctggaggtgctggccctgcagggcaatggcctgatggtgctgcaggtggacctgccctgcttcatctgcctgaagaggctgaacctggctgaaaatcggctgagccacctgcctgcctggacccaggccgtgtccctggaggtgctggacctgaggaacaacagcttcagcctgctgcccggcagcgccatgggcggcctggagaccagcctgcggcggctgtacctgcagggcaaccccctgagctgctgcggaaatggctggctggccgcccagctgcaccagggccgggtggatgtggatgccacccaggacctgatctgccgcttcagcagccaggaggaggtgtccctgagccacgtgcggcctgaggactgtgagaagggcggcctgaagaacatcaacctgatcatcatcctgaccttcatcctggtgtctgccatcctgctgaccaccctggccgcctgctgctgcgtgcggcggcagaagttcaaccagcagtacaaggcctag

SEQ ID NO: 314 - DNA, 1989 bp, Artificial Sequence; identical to SEQ ID NO: 313
  Description of Artificial Sequence: Synthetic Transcript Sequence

SEQ ID NO: 315 - DNA, 1989 bp, Artificial Sequence; identical to SEQ ID NO: 313
  Description of Artificial Sequence: Synthetic Transcript Sequence

SEQ ID NO: 316 - DNA, 561 bp, Artificial Sequence
  Description of Artificial Sequence: Synthetic Transcript Sequence
atgaggccccagatcctgctgctgctggccctgctgaccctgggcctggccgcccagcaccaggacaaggtgccctgcaagatggtggacaagaaggtgtcctgccaggtgctgggcctgctgcaggtgcccagcgtgctgcccccagacacagagaccctggacctgagcggcaaccagctgcggagcatcctggccagccccctgggcttctacacagccctgcggcacctggacctgagcaccaatgagatctccttcctgcagcccggggccttccaggccctgacccacctggagcacctgagcctggcccacaaccggctggccatggccacagccctgtctgctgggggcctgggccccctgccccgggtgaccagcctggacctgagcggcaacagcctgtacagcggcctgctggagcggctgctgggggaggcccccagcctgcacaccctgagcctggccgagaacagcctgacccggctgaccaggcacaccttccgggacatgcctgccctggagcagctggacctgcacagcaatgtgctgatgtag

SEQ ID NO: 317 - DNA, 1212 bp, Artificial Sequence
  Description of Artificial Sequence: Synthetic Transcript Sequence
atggcccacgccatggagaacagctggaccatcagcaaggagtaccacattgatgaggaggtgggctttgccctgcccaacccccaggagaacctgcctgacttctacaatgactggatgttcatcgccaagcacctgcctgacctgattgagagcggccagctgcgggagcgggtggagaagctgaacatgctgagcattgaccacctgacagaccacaagagccagaggctggcccggctggtgctgggctgcatcaccatggcctacgtgtggggcaagggccatggagatgtgaggaaggtgctgcccagaaatattgctgtgccctactgccagctgagcaagaagctggagctgccccccatcctggtgtatgctgactgtgtgctggccaactggaagaagaaggaccccaacaagcccctgacctatgagaacatggatgtgctcttctccttcagagatggagactgcagcaagggcttcttcctggtgtccctgctggtggagattgctgctgccagcgccatcaaggtgatccccaccgtcttcaaggccatgcagatgcaggagcgggacaccctgctgaaggccctgctggagatcgccagctgcctggagaaggccctgcaggtgttccaccagatccatgaccacgtgaaccccaaggccttcttctctgtgctgcgcatctacctgagcggctggaagggcaacccccagctgagtgatggcctggtgtatgagggcttctgggaggaccccaaggagtttgctgggggcagcgctggccagagcagcgtcttccagtgctttgatgtgctgctgggcatccagcagacagctgggggcggccacgccgcccagttcctgcaggacatgaggcgctacatgcccccagcccacaggaacttcctgtgcagcctggagagcaaccccagcgtgcgggagtttgtgctgagcaaaggagatgctggcctgcgggaggcctatgatgcctgtgtgaaggccctggtgtccctgcggagctaccacctgcagatcgtgaccaagtacatcctgatcccagccagccagcagcccaaggagaacaagaccagcgaggaccccagcaagctggaggccaagggcactggaggaacagacctgatgaacttcctgaagacagtgcgcagcaccacagagaagagcctgctgaaggagggctag

SEQ ID NO: 318 - DNA, 237 bp, Artificial Sequence
  Description of Artificial Sequence: Synthetic Transcript Sequence
atggcccacgccatggagaacagctggaccatcagcaaggagtaccacattgatgaggaggtgggctttgccctgcccaacccccaggagaacctgcctgacttctacaatgactggatgttcatcgccaagcacctgcctgacctgattgagagcggccagctgcgggagcgggtggagaagctgaacatgctgagcattgaccacctgacagaccacaagagccagaggctgtag

SEQ ID NO: 319 - DNA, 543 bp, Artificial Sequence
  Description of Artificial Sequence: Synthetic Transcript Sequence
atggcccacgccatggagaacagctggaccatcagcaaggagtaccacattgatgaggaggtgggctttgccctgcccaacccccaggagaacctgcctgacttctacaatgactggatgttcatcgccaagcacctgcctgacctgattgagagcggccagctgcgggagcgggtggagaagctgaacatgctgagcattgaccacctgacagaccacaagagccagaggctggcccggctggtgctgggctgcatcaccatggcctacgtgtggggcaagggccatggagatgtgaggaaggtgctgcccagaaatattgctgtgccctactgccagctgagcaagaagctggagctgccccccatcctggtgtatgctgactgtgtgctggccaactggaagaagaaggaccccaacaagcccctgacctatgagaacatggatgtgctcttctccttcagagatggagactgcagcaagggcttcttcctggtgtccctgctggtggagattgctgctgccagcgccatcaaggtgtag

SEQ ID NO: 320 - DNA, 1212 bp, Artificial Sequence; identical to SEQ ID NO: 317
  Description of Artificial Sequence: Synthetic Transcript Sequence

SEQ ID NO: 321 - DNA, 144 bp, Artificial Sequence
  Description of Artificial Sequence: Synthetic Transcript Sequence
atggcccacgccatggagaacagctggaccatcagcaaggagtaccacattgatgaggaggtgggctttgccctgcccaacccccaggagaacctgcctgacttctacaatgactggatgttcatcgccaagcacctgccctag

SEQ ID NO: 322 - DNA, 1224 bp, Artificial Sequence
  Description of Artificial Sequence: Synthetic Transcript Sequence
atggagccccaccggcccaacgtgaagacagctgtgcccctgagcctggagagctaccacatcagcgaggagtatggcttcctgctgcctgacagcctgaaggagctgcctgaccactaccggccctggatggagatcgccaacaagctgccccagctgattgatgcccaccagctgcaggcccacgtggacaagatgcccctgctgagctgccagttcctgaagggccaccgggagcagaggctggcccacctggtgctgtccttcctgaccatgggctacgtgtggcaggagggggaggcccagcctgctgaggtgctgcccaggaacctggccctgccctttgtggaggtgtccaggaacctgggcctgccccccatcctggtgcacagcgacctggtgctgaccaactggaccaagaaggaccctgatggcttcctggagatcggcaacctggagaccatcatctccttccctggaggagagagcctgcacggcttcatcctggtgacagccctggtggagaaggaggccgtgcccggcatcaaggccctggtgcaggccaccaatgccatcctgcagcccaaccaggaggccctgctgcaggccctgcagaggctgcggctgagcatccaggacatcaccaagaccctgggccagatgcatgactatgtggaccctgacatcttctacgccggcatccgcatcttcctgagcggctggaaggacaacccagccatgcctgctggcctgatgtatgaaggagtgtcccaggagcccctgaagtacagcggcggcagcgctgcccagagcacagtgctgcacgcctttgatgagttcctgggcatccgccacagcaaggagagcggggacttcctgtacaggatgagggactacatgccacccagccacaaggccttcatcgaggacatccacagcgcccccagcctgcgggactacatcctgagcagcggccaggaccacctgctgacagcctacaaccagtgtgtgcaggccctggccgagctgcggagctaccacatcaccatggtgaccaagtacctgatcacagctgctgccaaggccaagcacggcaagcccaaccacctgcccggccccccccaggccctgaaggaccggggcaccggcggcacagctgtgatgtccttcctgaagtctgtgcgggacaagaccctggagagcatcctgcacccccggggctag

SEQ ID NO: 323 - DNA, 1263 bp, Artificial Sequence
  Description of Artificial Sequence: Synthetic Transcript Sequence
atgctgcacttccactactatgacaccagcaacaagatcatggagccccaccggcccaacgtgaagacagctgtgcccctgagcctggagagctaccacatcagcgaggagtatggcttcctgctgcctgacagcctgaaggagctgcctgaccactaccggccctggatggagatcgccaacaagctgccccagctgattgatgcccaccagctgcaggcccacgtggacaagatgcccctgctgagctgccagttcctgaagggccaccgggagcagaggctggcccacctggtgctgtccttcctgaccatgggctacgtgtggcaggagggggaggcccagcctgctgaggtgctgcccaggaacctggccctgccctttgtggaggtgtccaggaacctgggcctgccccccatcctggtgcacagcgacctggtgctgaccaactggaccaagaaggaccctgatggcttcctggagatcggcaacctggagaccatcatctccttccctggaggagagagcctgcacggcttcatcctggtgacagccctggtggagaaggaggccgtgcccggcatcaaggccctggtgcaggccaccaatgccatcctgcagcccaaccaggaggccctgctgcaggccctgcagaggctgcggctgagcatccaggacatcaccaagaccctgggccagatgcatgactatgtggaccctgacatcttctacgccggcatccgcatcttcctgagcggctggaaggacaacccagccatgcctgctggcctgatgtatgagggcgtgtcccaggagcccctgaagtacagcggcggcagcgctgcccagagcacagtgctgcacgcctttgatgagttcctgggcatccgccacagcaaggagagcggggacttcctgtacaggatgagggactacatgccacccagccacaaggccttcatcgaggacatccacagcgcccccagcctgcgggactacatcctgagcagcggccaggaccacctgctgacagcctacaaccagtgtgtgcaggccctggccgagctgcggagctaccacatcaccatggtgaccaagtacctgatcacagctgctgccaaggccaagcacggcaagcccaaccacctgcccggccccccccaggccctgaaggaccggggcactggaggaacagctgtgatgtccttcctgaagtctgtgcgggacaagaccctggagagcatcctgcacccccggggctag

SEQ ID NO: 324 - DNA, 537 bp, Artificial Sequence
  Description of Artificial Sequence: Synthetic Transcript Sequence
atgcacagcagcgccctgctgtgctgcctggtgctgctgactggagtgcgggccagccctggccagggcacccagagcgagaacagctgcacccacttccctggcaacctgcccaacatgctgcgggacctgagagatgccttcagccgggtgaagaccttcttccagatgaaggaccagctggacaacctgctgctgaaggagagcctgctggaggacttcaagggctacctgggctgccaggccctgtctgagatgatccagttctacctggaggaggtgatgccccaggccgagaaccaggaccctgacatcaaggcccacgtgaacagcctgggggagaacctgaagaccctgcggctgcggctgcggcgctgccaccgcttcctgccctgtgagaacaagagcaaggctgtggagcaggtgaagaatgccttcaacaagctgcaggagaagggcatctacaaggccatgtctgaatttgacatcttcatcaactacatcgaggcctacatgaccatgaagatcagaaattag

SEQ ID NO: 325 - DNA, 762 bp, Artificial Sequence
  Description of Artificial Sequence: Synthetic Transcript Sequence
atgtggcccccaggcagcgccagccagcccccacccagccctgctgctgccaccggcctgcaccctgctgcccggcctgtgtccctgcagtgccgcctgtccatgtgcccagcccggagcctgctgctggtggccaccctggtgctgctggaccacctgagcctggccaggaacctgcctgtggccaccccagaccccggcatgttcccctgcctgcaccacagccagaacctgctgcgggctgtgagcaacatgctgcagaaggcccggcagaccctggagttctacccctgcaccagcgaggagattgaccacgaggacatcaccaaggacaagaccagcacagtggaggcctgcctgcccctggagctgaccaagaatgaaagctgcctgaacagccgggagaccagcttcatcaccaacggcagctgcctggccagcaggaagaccagcttcatgatggccctgtgcctgagcagcatctatgaggacctgaagatgtaccaggtggagttcaagaccatgaatgccaagctgctgatggaccccaagaggcagatcttcctggaccagaacatgctggccgtgattgatgagctgatgcaggccctgaacttcaacagcgagaccgtgccccagaagagcagcctggaggagccagacttctacaagaccaagatcaagctgtgcatcctgctgcacgccttccgcatccgggctgtgaccatcgacagagtgatgagctacctgaatgccagctag

SEQ ID NO: 326 - DNA, 720 bp, Artificial Sequence
  Description of Artificial Sequence: Synthetic Transcript Sequence
atgtggcccccaggcagcgccagccagcccccacccagccctgctgctgccaccggcctgcaccctgctgcccggcctgtgtccctgcagtgccgcctgtccatgtgcccagcccggagcctgctgctggtggccaccctggtgctgctggaccacctgagcctggccaggaacctgcctgtggccaccccagaccccggcatgttcccctgcctgcaccacagccagaacctgctgcgggctgtgagcaacatgctgcagaaggcccggcagaccctggagttctacccctgcaccagcgaggagattgaccacgaggacatcaccaaggacaagaccagcacagtggaggcctgcctgcccctggagctgaccaagaatggcagctgcctggccagcaggaagaccagcttcatgatggccctgtgcctgagcagcatctatgaggacctgaagatgtaccaggtggagttcaagaccatgaatgccaagctgctgatggaccccaagaggcagatcttcctggaccagaacatgctggccgtgattgatgagctgatgcaggccctgaacttcaacagcgagaccgtgccccagaagagcagcctggaggagccagacttctacaagaccaagatcaagctgtgcatcctgctgcacgccttccgcatccgggctgtgaccatcgacagagtgatgagctacctgaatgccagctag

SEQ ID NO: 327 - DNA, 648 bp, Artificial Sequence
  Description of Artificial Sequence: Synthetic Transcript Sequence
atgtggcccccaggcagcgccagccagcccccacccagccctgctgctgccaccggcctgcaccctgctgcccggcctgtgtccctgcagtgccgcctgtccatgtgcccagcccggagcctgctgctggtggccaccctggtgctgctggaccacctgagcctggccaggaacctgcctgtggccaccccagaccccggcatgttcccctgcctgcaccacagccagaacctgctgcgggctgtgagcaacatgctgcagaagaatgaaagctgcctgaacagccgggagaccagcttcatcaccaacggcagctgcctggccagcaggaagaccagcttcatgatggccctgtgcctgagcagcatctatgaggacctgaagatgtaccaggtggagttcaagaccatgaatgccaagctgctgatggaccccaagaggcagatcttcctggaccagaacatgctggccgtgattgatgagctgatgcaggccctgaacttcaacagcgagaccgtgccccagaagagcagcctggaggagccagacttctacaagaccaagatcaagctgtgcatcctgctgcacgccttccgcatccgggctgtgaccatcgacagagtgatgagctacctgaatgccagctag

SEQ ID NO: 328 - DNA, 429 bp, Artificial Sequence
  Description of Artificial Sequence: Synthetic Transcript Sequence
atgagcctgctgcctgtgccctacacagaagctgccagcctgagcacaggcagcacagtgaccatcaagggccggcccctggcctgcttcctgaatgagccctacctgcaggtggacttccacacagagatgaaggaggagagtgacatcgtgttccacttccaggtgtgcttcggccggcgggtggtgatgaacagccgggagtatggagcctggaagcagcaggtggagagcaagaacatgcccttccaggacggccaggagtttgagctgagcatctctgtgctgcctgacaagtaccaggtgatggtgaatggccagagcagctacacctttgaccaccgcatcaagccagaggccgtgaagatggtgcaggtgtggagggacatcagcctgaccaagttcaacgtgtcctacctgaagaggtag

SEQ ID NO: 329 - DNA, 657 bp, Artificial Sequence
  Description of Artificial Sequence: Synthetic Transcript Sequence
atgagctttgtgggggagaacagcggcgtgaagatgggcagcgaggactgggagaaggatgagccccagtgctgcctggaggaccctgctggcagccccctggagcccggccccagcctgcccaccatgaactttgtgcacaccagccccaaggtgaagaacctgaaccccaagaagttcagcatccatgaccaggaccacaaggtgctggtgctggacagcggcaacctgattgctgtgcctgacaagaactacatccggcctgagatcttctttgccctggccagcagcctgagcagcgccagcgctgagaagggcagccccatcctgctgggcgtgtccaaaggagagttctgcctgtactgtgacaaggacaagggccagagccaccccagcctgcagctgaagaaggagaagctgatgaagctggccgcccagaaggagagcgcccggcggcccttcatcttctaccgggcccaggtgggctcctggaacatgctggagagcgctgcccaccctggctggttcatctgcaccagctgcaactgcaatgaacctgtgggcgtgacagacaagtttgagaacaggaagcacatcgagttctccttccagcctgtgtgcaaggccgagatgagccccagcgaggtgtctgactag

SEQ ID NO: 330 - DNA, 579 bp, Artificial Sequence
  Description of Artificial Sequence: Synthetic Transcript Sequence
atgagcggctgtgaccggcgggagacagagaccaagggcaagaacagcttcaagaagaggctgcggggccccaaggtgaagaacctgaaccccaagaagttcagcatccatgaccaggaccacaaggtgctggtgctggacagcggcaacctgattgctgtgcctgacaagaactacatccggcctgagatcttctttgccctggccagcagcctgagcagcgccagcgctgagaagggcagccccatcctgctgggcgtgtccaaaggagagttctgcctgtactgtgacaaggacaagggccagagccaccccagcctgcagctgaagaaggagaagctgatgaagctggccgcccagaaggagagcgcccggcggcccttcatcttctaccgggcccaggtgggctcctggaacatgctggagagcgctgcccaccctggctggttcatctgcaccagctgcaactgcaatgaacctgtgggcgtgacagacaagtttgagaacaggaagcacatcgagttctccttccagcctgtgtgcaaggccgagatgagccccagcgaggtgtctgactag

SEQ ID NO: 331 - DNA, 474 bp, Artificial Sequence
  Description of Artificial Sequence: Synthetic Transcript Sequence
atgagctttgtgggggagaacagcggcgtgaagatgggcagcgaggactgggagaaggatgagccccagtgctgcctggaggagatcttctttgccctggccagcagcctgagcagcgccagcgctgagaagggcagccccatcctgctgggcgtgtccaagggggagttctgcctgtactgtgacaaggacaagggccagagccaccccagcctgcagctgaagaaggagaagctgatgaagctggccgcccagaaggagagcgcccggcggcccttcatcttctaccgggcccaggtgggctcctggaacatgctggagagcgctgcccaccctggctggttcatctgcaccagctgcaactgcaatgaacctgtgggcgtgacagacaagtttgaaaataggaagcacatcgagttctccttccagcctgtgtgcaaggccgagatgagccccagcgaggtgtctgactag

SEQ ID NO: 332 - DNA, 594 bp, Artificial Sequence
  Description of Artificial Sequence: Synthetic Transcript Sequence
atgagctttgtgggggagaacagcggcgtgaagatgggcagcgaggactgggagaaggatgagccccagtgctgcctggagggccccaaggtgaagaacctgaaccccaagaagttcagcatccatgaccaggaccacaaggtgctggtgctggacagcggcaacctgattgctgtgcctgacaagaactacatccggcctgagatcttctttgccctggccagcagcctgagcagcgccagcgctgagaagggcagccccatcctgctgggcgtgtccaagggggagttctgcctgtactgtgacaaggacaagggccagagccaccccagcctgcagctgaagaaggagaagctgatgaagctggccgcccagaaggagagcgcccggcggcccttcatcttctaccgggcccaggtgggctcctggaacatgctggagagcgctgcccaccctggctggttcatctgcaccagctgcaactgcaatgaacctgtgggcgtgacagacaagtttgaaaataggaagcacatcgagttctccttccagcctgtgtgcaaggccgagatgagccccagcgaggtgtctgactag

SEQ ID NO: 333 - DNA, 537 bp, Artificial Sequence
  Description of Artificial Sequence: Synthetic Transcript Sequence
atgagctttgtgggggagaacagcggcgtgaagatgggcagcgaggactgggagaaggatgagccccagtgctgcctggaggaccctgctggcagccccctggagcccggccccagcctgcccaccatgaactttgtgcacaccaagatcttctttgccctggccagcagcctgagcagcgccagcgctgagaagggcagccccatcctgctgggcgtgtccaaaggagagttctgcctgtactgtgacaaggacaagggccagagccaccccagcctgcagctgaagaaggagaagctgatgaagctggccgcccagaaggagagcgcccggcggcccttcatcttctaccgggcccaggtgggctcctggaacatgctggagagcgctgcccaccctggctggttcatctgcaccagctgcaactgcaatgaacctgtgggcgtgacagacaagtttgagaacaggaagcacatcgagttctccttccagcctgtgtgcaaggccgagatgagccccagcgaggtgtctgactag

SEQ ID NO: 334 - DNA, 1344 bp, Artificial Sequence
  Description of Artificial Sequence: Synthetic Transcript Sequence
atgatccccaccttcaccgccctgctgtgcctgggcctgagcctgggccccaggacccacatgcaggccggccccctgcccaagcccaccctgtgggccgagcccggcagcgtcatctcctggggcaacagcgtgaccatctggtgccagggcaccctggaggcccgggagtaccgcctggacaaggaggagagccctgccccctgggaccggcagaaccccctggagcccaagaacaaggcccgcttcagcatccccagcatgacagaggactatgccggccgctaccgctgctactaccgcagccctgtgggctggagccagcccagcgaccccctggagctggtgatgaccggggcctacagcaagcccaccctgagcgccctgcccagccccctggtgaccagcggcaagtctgtgaccctgctgtgccagagccgcagccccatggacaccttcctgctgatcaaggagcgggccgcccaccccctgctgcacctgcggagtgaacatggagcccagcagcaccaggccgagttccccatgagccctgtgacctctgtgcatggaggcacctaccgctgcttcagcagccacggcttcagccactacctgctgagccaccccagcgaccccctggagctgattgtgtctggcagcctggaggacccccggcccagccccaccaggtctgtgtccacagctgctggccctgaggaccagcccctgatgcccaccggctctgtgccccacagcggcctgcggcggcactgggaggtgctgattggagtgctggtggtgtccatcctgctgctgagcctgctgctcttcctgctgctgcagcactggaggcagggcaagcacaggaccctggcccagaggcaggccgacttccagaggcctcctggagctgctgagcctgagcccaaggatggcggcctgcagaggaggagcagccctgctgctgatgtgcagggcgagaacttctgtgccgctgtgaagaacacccagccagaagatggagtggagatggacaccaggagcccccatgatgaggacccccaggccgtgacctacgccaaggtgaagcacagccggccccggcgggagatggccagcccccccagccccctgtctggagagttcctggacaccaaggaccggcaggccgaggaggaccggcagatggacacagaggccgccgccagcgaggccccccaggatgtgacctacgcccagctgcacagcttcaccctgcggcagaaggccacagagcccccacccagccaggagggcgccagccctgctgagcccagcgtgtatgccaccctggccatccactag

SEQ ID NO: 335 - DNA, 636 bp, Artificial Sequence
  Description of Artificial Sequence: Synthetic Transcript Sequence
atggtggcccacaaccaggtggccgctgacaatgctgtgtccacagctgctgagcccaggagaagacctgagcccagcagcagcagcagcagcagccctgctgccccagcccggccccggccctgcccagctgtgcctgccccagcccctggggacacccacttccgcaccttccgcagccacgccgactaccgccgcatcacccgggccagcgccctgctggatgcctgtggcttctactggggccccctgtctgtgcatggagcccacgagcggctgcgggcagagcctgtgggcaccttcctggtgcgggacagccggcagaggaactgcttctttgccctgtctgtgaagatggccagcggccccaccagcatccgggtgcacttccaggccggccgcttccacctggatggcagccgggagagctttgactgcctgtttgagctgctggagcactacgtggccgcccccaggaggatgctgggcgcccccctgcggcagaggagagtgcggcccctgcaggagctgtgccggcagagaattgtggccaccgtgggccgggagaacctggcccgcatccccctgaaccctgtgctgcgggactacctgagcagcttccccttccagatctag

SEQ ID NO: 336 - DNA, 1596 bp, Artificial Sequence
  Description of Artificial Sequence: Synthetic Transcript Sequence
atggccgccaccctggacctgaagagcaaggaggagaaggatgctgagctggacaagagaattgaggccctgcggaggaagaatgaggccctgatccgccgctaccaggagattgaggaggacaggaagaaggccgagctggagggcgtggccgtgacagcccccaggaagggccgctctgtggagaaggaaaatgtggccgtggagagcgagaagaacctgggccccagccgccgcagccctggcaccccccggcccccaggggccagcaaaggaggccgcaccccaccccagcagggcggccgggccggcatgggccgggccagccgctcctgggagggcagccctggagagcagccccggggcggcggggccggcggccggggccggcggggccggggccggggcagcccccacctgtctggagctggggacaccagcatcagtgacaggaagagcaaggagtgggaggagcggcggcggcagaacatcgagaagatgaatgaggagatggagaagattgctgaatatgaaagaaaccagcgggagggcgtgctggagcccaaccctgtgaggaacttcctggatgacccccggcggcgcagcggccccctggaggagagcgagcgggaccggcgggaggagagcagaagacatggaagaaactggggcggccctgactttgagcgggtgcgctgtggcctggagcacgagcggcagggccggcgggccggcctgggcagcgctggggacatgaccctgtccatgacaggccgggagaggtctgagtacctgcgctggaagcaggagcgggagaagattgaccaggagcggctgcagaggcacaggaagcccaccggccagtggaggcgggagtgggatgctgagaagacagatggcatgttcaaggatggccctgtgcctgcccacgagcccagccacagatatgatgaccaggcctgggcccggccccccaagccacccaccttcggggagttcctgagccagcacaaggccgaggccagcagcagaagaagaaggaagagcagccggccccaggccaaggccgccccccgggcctacagcgaccatgatgaccgctgggagaccaaggagggcgccgccagccctgcccctgagaccccccagcccaccagccctgagaccagccccaaggagacccccatgcagcccccagagatcccagccccagcccaccggcccccagaagatgaaggagaagaaaatgaaggagaggaggatgaggagtgggaggacatcagtgaagatgaggaggaggaggagattgaggtggaggagggagatgaggaggagcccgcccaggaccaccaggcccctgaggccgcccccaccggcatcccctgcagcgagcaggcccatggagtgcccttcagccctgaggagcccctgctggagccccaggcccctggcacccccagcagccccttcagcccccccagcggccaccagcctgtgtctgactggggcgaggaggtggagctgaacagccccaggaccacccacctggccggggccctgagccctggagaggcctggccctttgagagcgtgtag

SEQ ID NO: 337 - DNA, 531 bp, Artificial Sequence
  Description of Artificial Sequence: Synthetic Transcript Sequence
atgcggatcttcgccgtgttcatcttcatgacctactggcacctgttaaacgctccctacaataagattaaccaaagaattctggtggttgacccggtgactagcgaacacgagctgacctgccaagctgaaggctatcccaaggcggaagtgatttggacaagcagtgaccaccaggtactctccggaaaaaccacgacaacaaatagcaagcgtgaggagaaactgtttaacgttacatctaccttgcgcatcaacaccacaactaatgagatattttactgcacatttcgcagactggacccagaagaaaatcacaccgcggaattagttatccccgagctgcctctggctcatccccccaacgagcgcacccatcttgtgatccttggtgccattcttctctgcctgggggtggccttaacttttatcttcaggttacgaaaaggacggatgatggacgtcaagaaatgcggtattcaagacacaaattccaagaaacagtccgacactcacttggaagagacctag

SEQ ID NO: 338 - DNA, 873 bp, Artificial Sequence
  Description of Artificial Sequence: Synthetic Transcript Sequence
atgcggatcttcgccgtgttcatcttcatgacctactggcacctgctgaacgccttcactgtgactgtgcccaaggacctctacgtggtggagtatggttctaatatgactattgagtgcaagttcccagtcgagaaacaactcgatctcgccgccctcattgtgtattgggagatggaagacaagaacattattcagtttgtacacggagaagaggatctcaaggtgcagcacagcagctacagacaacgagcgagactgctgaaagatcagttgtcccttgggaacgccgcgctccagatcacagatgtaaagctgcaggatgccggggtctaccggtgtatgatttcttacggcggtgctgactacaagcggattactgtcaaggttaacgctccatacaacaaaatcaaccaacgcatccttgtggtggatcccgtaactagcgagcacgaactgacctgtcaggctgagggatatccaaaagctgaggtaatctggaccagctcagaccatcaagtgttgtcaggaaagacaactacaactaacagtaaacgggaggagaaacttttcaatgtaacttcaaccctccggataaacactacaacaaacgagatcttctattgcacctttaggcgtctcgaccctgaggagaaccatacagctgagctggttatcccggaattgccactagcccatccaccaaatgaaaggacccacctggtgatcttaggtgctattctgttgtgtctcggcgtagctctgacattcattttcagactgagaaaaggaagaatgatggacgtgaagaaatgtggcattcaggacactaattctaagaagcagagcgacactcatttggaagaaacatag

SEQ ID NO: 339 - DNA, 612 bp, Artificial Sequence
  Description of Artificial Sequence: Synthetic Transcript Sequence
atggtgcggctgcccctgcagtgcgtgctgtggggctgcctgctgacagccgtgcacccagagcccccaaccgcctgtagagagaagcaatatttaatcaacagccagtgttgttcattgtgtcaacctggacagaagctggtgtcggactgcaccgaattcacagagacagagtgcttgccttgcggcgagtctgaattcctggatacttggaaccgggagactcactgccaccaacacaagtactgcgaccccaacttgggactgagagttcagcagaaagggacctctgagacggacactatctgcacatgcgaggagggctggcactgtacttccgaggcgtgcgaatcctgcgtcctgcaccgcagctgtagtccaggattcggtgtgaaacagattgccacaggggtcagcgacacgatctgtgagccatgccccgtcggatttttttcgaacgtatcatcagcttttgaaaagtgccatccctggactagaagccctggaagcgccgaatctcccggcggagacccgcaccacctcagggatccagtatgccatccccttggcgccgggctatatcagaagggaggccaggaagcgaaccagtag

SEQ ID NO: 340 - DNA, 786 bp, Artificial Sequence
  Description of Artificial Sequence: Synthetic Transcript Sequence
ggccggagccccctgcggacccgggaccgggtgctgaccaactgggaagacgggcttactgtcgcttatggcgccgtgaagctcattcagtctctgtcactgcaacctgttggctggcaacaaaattggggcctctcttcgcccccaaccatgcttctcccaagcagggctcagtcccccacagaattaccccttgcccctcttgcagaacctaacacaggctgctcttccctcctgagctggcactccaccaggggggaacttcacctgtgggcgttggggttgggccagatgggcggtagcaaatgcgggtctccgctctctcctctggcacctactttggaagcactcagacggccgtggtgtggccagcagggagcaggcggcacacgaggtatctctacagaccccccaagcggaaaaggggggcgcgcgtggggccgcgaccccctccctagggaaggcttattgagaggtaccgcggcccccgcggctggcggggaccttactccctgcctgtctagaccgccaacaccttccaggaatccaaggcggtccatcttccctaccatcttcctggcccctacattactgttgcaatgtcggagattatatatggatgccaatagaagcccgaggcgtatggccaaaagagtggcaagccagtgccgcagagatagcgaggcagcccctacccaggaatgtggccacgtcgggaagcaggccgtagggcagcgcgcctggtgctgttgctgctgcggagttcgtgtgaggggatggcattag

SEQ ID NO: 341 - DNA, 834 bp, Artificial Sequence
  Description of Artificial Sequence: Synthetic Transcript Sequence
atggtgcggctgcccctgcagtgcgtgctgtggggctgcctgctgacggccgtgcatcctgagccccctacagcatgtcgcgagaagcagtatctcatcaattcacagtgctgctccctgtgccagcccggccagaagcttgtgtccgattgtacggaattcaccgagaccgaatgtcttccctgtggtgagagcgagttcttagacacatggaatcgggagacccactgccatcagcataaatactgtgacccaaatctgggtcttcgcgtgcaacagaaaggcacgtcagagaccgataccatctgcacatgtgaggaaggttggcattgcacttccgaggcatgcgaatcgtgtgtcctgcatcgatcttgtagtccaggattcggggtaaagcagatcgctacaggagtttcagacaccatttgcgaaccctgccccgtgggatttttctcgaacgtctcctcagctttcgagaagtgccatccctggacttcttgcgaaacgaaagatctggttgttcaacaggccggcaccaataagaccgacgtcgtctgtggacctcaggataggctgcgggctcttgtcgtgatccccattatcttcggaatactcttcgccatcctgctggtgttagttttcatcaagaaagtagctaaaaagcctacaaacaaagccccccatcccaaacaggaaccacaggagatcaattttcctgatgatctgccaggatccaatacagccgcacctgtccaggaaacgctgcacggttgccagcctgtcacccaagaggatggcaaggagtctaggataagtgttcaagagagacaatag

SEQ ID NO: 342 - DNA, 723 bp, Artificial Sequence
  Description of Artificial Sequence: Synthetic Transcript Sequence
atgatcgagacctacaaccagaccagcccccggagcgccgccaccggtttgccaatctctatgaaaatcttcatgtacctcttgacagtctttctcatcactcaaatgattggatccgcgctgtttgcagtgtatttgcatcgccgtctcgacaagatagaggacgaaagaaacctgcatgaagatttcgtcttcatgaaaactatccagcgctgcaacaccggagagcggtccctctcacttctgaactgcgaggaaatcaaaagtcagtttgaagggtttgtgaaggatatcatgttgaacaaagaagagacaaagaaggagaatagttttgagatgcaaaaagttcttcaatgggctgaaaagggctattatactatgagtaacaacctcgtcactctcgagaatggcaaacagctgacggttaaacgtcaaggactctactacatttatgcgcaggtcactttctgctccaatcgcgaagcgtcgtcacaggccccttttatcgctagcctgtgtctgaagtccccggggcgttttgagagaattctactgcgcgccgcaaacactcactctagcgccaaaccttgcggacagcagtcaatccacttagggggcgtgttcgaattgcaaccaggtgcaagtgtttttgtgaacgtgacagacccgtcacaggtgtcccatgggaccggattcacgtcctttgggctgctgaagctgtag

SEQ ID NO: 343 - DNA, 786 bp, Artificial Sequence
  Description of Artificial Sequence: Synthetic Transcript Sequence
atgatcgagacctacaaccagaccagcccccggagcgccgccaccggtttgcctatctctatgaagatcttcatgtaccttctcactgtttttctgattacccagatgatcggttctgccctgttcgcagtgtacttgcaccgtcgtctggataaaatcgaagacgagcggaatctccatgaggatttcgtgtttatgaagacaatacagcgctgcaacaccggcgaaagaagtctcagcttgctcaactgcgaagagatcaaaagccagtttgaggggttcgtgaaagacatcatgctcaataaggaggagacaaaaaaggagaactcattcgaaatgcaaaagggagatcagaacccacagatcgcggcacatgtgatttctgaagcctccagtaagactacctcagtgttgcagtgggccgagaaaggatactatacaatgagcaacaatctggtcaccctggagaacggaaaacaattgacagttaagagacagggcctgtactacatttatgcccaggtgacgttctgctccaatcgtgaagctagcagccaggccccgtttatcgcttctctatgcctgaaaagtcctggaaggtttgagcgaattctgctcagagcagcgaatacccacagcagtgccaaaccctgtgggcagcagtctattcaccttggcggcgtgttcgagctgcagccgggcgcatccgtgttcgtgaatgtaacagacccgagtcaagtgagtcacggcaccggttttaccagttttgggcttttgaaattgtag

SEQ ID NO: 344 - DNA, 5169 bp, Artificial Sequence
  Description of Artificial Sequence: Synthetic Transcript Sequence
atgcggaccggctgggccaccccccggcggcccgccggcctgctgatgcttttgttttggttcttcgacctggccgagcccagtggccgggctgctaacgacccttttaccatagtccacggcaatacaggcaagtgcatcaaacctgtatatgggtggatcgtcgccgacgattgtgatgagaccgaggataagctctggaagtgggtctctcaacacagactcttccacctccactctcagaagtgtctcgggcttgatattactaaaagcgtcaacgaattacgtatgttttcttgcgattcatcggctatgctttggtggaaatgcgaacaccactctctttacggtgcagccaggtacaggctggctctgaaggacgggcacggtaccgccatcagcaacgcgagtgacgtgtggaagaaagggggtagcgaagaaagcctttgtgatcaaccataccacgagatttacacgcgggacggcaatagctatggccgtccctgcgaattcccttttctgatagatggaacatggcaccacgactgcatcctggacgaagatcatagcggcccatggtgcgccaccaccctgaattatgagtacgacagaaaatgggggatttgcctgaagcctgaaaacgggtgcgaggacaattgggaaaaaaacgaacagttcggtagctgttaccagttcaacacgcagaccgccctcagctggaaggaggcttacgtttcttgtcaaaaccagggagccgatctcttgagcatcaattccgctgcagagctgacatatcttaaggagaaagagggtatagcaaaaatattttggattgggcttaatcagctttacagtgcccgcggctgggaatggtccgatcataagccgctgaattttctgaattgggaccctgataggccatctgccccaaccattggaggaagttcatgtgcaaggatggacgctgagtccggactctggcagtctttctcgtgtgaggcccagcttccatatgtgtgtagaaagcctctaaacaatacggtcgagctgacagatgtgtggacctatagcgatactagatgcgatgctgggtggctccctaataatggattctgctatctactcgtaaatgaaagcaactcgtgggacaaagcgcacgcgaagtgtaaggctttctcctccgacctgattagcattcattctctggccgacgtggaggtcgtggtgaccaaactacacaacgaagacatcaaggaagaggtgtggataggcctcaagaacattaacatacccactttgtttcaatggtccgacggcacagaagtgactttgacatactgggatgagaacgagcccaacgtcccttacaacaagactccaaactgtgtcagctatctcggtgaacttggccaatggaaagtgcagtcatgcgaggagaagttgaaatatgtttgcaagaggaagggggagaaactgaacgatgcctcctctgataaaatgtgtccccccgacgagggctggaaacgccatggagagacatgttataaaatctatgaggacgaagtccctttcggaactaattgtaatcttactatcacttccagattcgagcaggagtatctcaacgacctgatgaagaaatatgacaaaagtctgcgcaagtatttttggacgggcctgagagacgtggactcttgcggggaatacaattgggcaaccgtgggcggacggagaagggctgtgacgttttccaactggaattttctggaacctgcatctcccgggggttgcgtagctatgtctactggaaagagtgttggaaaatgggaggtcaaggactgccgctctttcaaagcactgagcatctgtaaaaagatgagcggtccgctgggtcccgaggaggcctctcctaaacctgatgacccctgccctgaagggtggcagtcatttcccgctagtctgagttgttataaggtgtttcatgcagaacgcatcgtgcgaaaacggaattgggaggaagctgagagattttgtcaggccttgggggcgcacctaagctccttcagccacgttgatgagattaaagaattcttacatttcctgactgatcagttcagtgggcagcattggctctggatcggattgaataagcgctcccccgacttacagggcagttggcagtggagcgataggacaccagtatcaacaatcatcatgcctaacgagtttcagcaagattacgatatccgcgactgtgccgccgtgaaagtatttcacagaccttggcgaagagggtggcacttctatgacgatcgagagttcatttatttgcgcccatttgcctgtgacacaaaacttgaatgggtatgccagatccccaagggaagaactcccaaaacacctgactggtataatcctgatcgggccgggattcatggtcctcccctgatcatagaaggctcagagtattggttcgttgccgacttgcatctgaattatgaagaagctgtactgtactgtgcctctaaccatagctttttggctaccatcaccagctttgtgggccttaaagccatcaagaacaagatagccaacatctcgggcgacggccaaaaatggtggattcggataagtgagtggccaatagatgaccatttcacctactcccgatacccttggcaccgcttccctgtcaccttcggggaggagtgtctctacatgagtgctaaaacgtggctcatcgaccttggaaaaccaacagattgctctaccaagcttccattcatatgcgaaaaatacaacgtgagcagccttgagaagtatagtccagattctgccgccaaggtgcaatgcagcgaacaatggattccattccaaaataaatgctttttaaagattaagcccgtgtccctcacattctcacaggccagcgacacatgccattcttacggcggaacccttccctcggtcctgagccagatcgaacaagattttatcacaagcttgctgcccgatatggaagccaccctctggattggattacgttggaccgcatacgaaaaaattaataagtggacagataaccgagagctgacatactcaaatttccacccacttttggtgtcaggccgtctgcgaatacccgaaaacttcttcgaagaggagtctaggtatcactgtgccctcatactgaacttgcagaaatcaccgtttacgggtacctggaattttacttcctgttccgagagacacttcgttagcttgtgccaaaagtactctgaagtcaagagcagacagactctgcagaacgccagcgaaactgtcaagtacctcaacaacctttacaaaatcattcccaaaacccttacctggcacagcgccaagcgggaatgcctgaaaagcaacatgcagctggtctccatcacggatccctaccagcaggcattcctttccgtacaggctctgcttcacaacagcagcctgtggatcgggctgtttagccaggacgacgaactgaactttggctggagcgatggcaagcgactgcacttctctaggtgggccgaaaccaacgggcagctcgaagattgcgttgtcctggatactgatggattctggaaaacagtcgactgcaatgacaaccagccaggagcaatttgttattattcagggaacgagactgaaaaggaagtgaaacctgtggattctgtgaaatgtccttcccctgtcctgaatactccgtggatcccgtttcagaactgttgttacaactttataattacgaaaaatcgccatatggccaccacccaggacgaagtgcacaccaaatgtcagaaactgaaccccaagagccatatcctctctatccgtgacgaaaaggaaaacaattttgtgctcgagcagctactatacttcaactatatggccagttgggttatgcttggcattacttacaggaataagtccttaatgtggtttgataaaacccccttgagctatactcactggagggcgggccgtccaaccatcaagaacgagaaattccttgccggactgtccaccgacggattctgggatatccagactttcaaagtgatagaggaggctgtgtattttcaccagcacagcattcttgcctgcaagatcgaaatggttgattataaagaggaatacaacaccacattacctcagtttatgccctacgaagacggcatttattccgtgatacagaagaaggtgacgtggtacgaggctctgaatatgtgcagtcagtcaggcggccacctcgccagcgtgcacaaccagaacgggcagctgttcctggaagacatcgtcaaacgcgacggctttcccttgtgggtagggctatcatcccacgacggctcggagtcctctttcgagtggtcagacggaagcaccttcgactacattccatggaaaggccaaacctctcccggcaattgcgtgctcctggatccgaaaggaacttggaagcatgagaagtgtaactctgtgaaagatggcgcaatatgctataagccaacaaagagcaagaagctgtctcggttgacctactctagtagatgtcccgcggccaaagagaacggaagccggtggatacaatacaaagggcactgctataaatcagaccaagcactccactccttcagtgaagccaaaaaactgtgcagcaaacatgatcattctgcgacgattgtttctattaaagacgaggacgagaataagttcgtctcgcggctaatgcgggaaaataataatatcacaatgcgcgtctggctgggcctgtcacagcattccgtagaccagagctggagctggctggacggatccgaggtcacttttgtgaagtgggaaaataaatcaaaatccggagttggtcggtgtagcatgctgatagcttctaatgaaacatggaaaaaggttgagtgcgaacacggttttggaagggtagtatgtaaggtgcctctcggtcccgactacactgccatcgccattatcgttgcaactctctcaattttggtgctgatgggcggcctgatctggtttctttttcagcgccacagactgcacttggctgggttcagcagtgtgaggtacgctcagggggtcaacgaggacgaaattatgctcccatcattccacgactag

SEQ ID NO: 345 - DNA, 5454 bp, Artificial Sequence
  Description of Artificial Sequence: Synthetic Transcript Sequence
atgcggaccggctgggccaccccccggcggcccgccggcctgctgatgctgctgttttggttctttgatcttgccgagccttccggccgcgcagccaacgacccatttactatagtgcacggaaataccggtaaatgtataaagccagtttacggttggatcgtggccgacgactgcgatgaaacagaggacaaattatggaagtgggtttctcagcatagactgttccacctgcactcccaaaaatgcctgggcctcgatatcactaagtctgtgaatgaactgcgaatgttcagctgcgactcaagtgcgatgctctggtggaaatgtgagcaccatagtttgtacggcgcagctaggtaccgactcgcccttaaggatgggcacgggactgcgatctcaaacgcaagtgacgtgtggaagaagggggggtccgaagagtctctctgcgaccagccctaccatgagatctacacccgtgatggcaacagttacgggcggccctgtgagttcccattcctgatcgatggcacatggcaccacgactgtattttggacgaagaccactccggcccctggtgcgctactacgctaaattacgagtacgatagaaaatggggtatctgcctgaagccagaaaatgggtgcgaagataactgggagaaaaacgaacagttcgggagctgctaccagtttaatacacagaccgcgttatcgtggaaggaggcttatgtcagttgtcaaaatcagggtgctgacttgctgtccatcaattctgccgccgaactgacctatttgaaggaaaaggagggaatagctaagatcttctggataggtctcaaccagctctattctgccaggggatgggagtggtctgaccacaagcccttaaattttctgaactgggaccccgaccgacctagcgcgccaactataggtggcagcagttgtgccaggatggacgctgaaagcgggctctggcaatcattcagttgcgaagcacagctgccgtacgtgtgtagaaagcccctcaataacaccgtcgaactcactgatgtgtggacgtactcagacactcgctgcgatgccggctggctacccaacaatggattttgctacctgcttgtgaacgaatctaacagctgggacaaagctcacgctaaatgcaaggcattttcctcagacctgatcagcatacactcccttgcggatgtggaggtggtggttactaaattgcacaatgaggacattaaggaggaggtttggatcggccttaagaacataaatatccccacgctgtttcagtggagtgatggtaccgaggtcacgctgacatactgggatgagaatgaacccaatgtcccttacaacaaaacccccaattgcgtctcgtacctcggtgaattgggccagtggaaagttcagtcttgcgaggagaagctcaagtacgtgtgtaagcgcaagggggaaaagctcaacgatgcctcctccgacaagatgtgccctccagatgagggctggaagagacatggcgagacttgctacaagatttatgaggacgaggtgcccttcggcactaactgtaaccttacaattacctcaagattcgagcaagaatacttgaacgaccttatgaaaaagtatgataagtccctccgcaaatacttttggacaggccttcgtgatgtcgactcttgcggggagtacaactgggcaactgtaggtgggaggcggcgtgctgtgacattttctaattggaattttctggaacccgctagtcctgggggctgtgtcgccatgagcacgggtaaaagcgtagggaaatgggaagtgaaggattgccggagctttaaggctctttccatctgcaaaaagatgtccggaccattaggcccagaggaggcaagtccaaagccggatgacccttgccctgagggatggcagagtttccctgcaagtctttcctgttacaaagtgttccacgccgaaaggattgtacggaagaggaattgggaagaggccgaacgcttctgccaagctttaggagcccatctcagcagtttttcccacgtagacgaaattaaggagttcctgcattttttgacggaccagtttagtggacagcactggctctggattggattgaataaaagaagccctgatctgcagggcagctggcagtggagcgaccgcactcctgtcagcacgatcatcatgcctaacgagttccagcaggactatgacatccgagactgtgccgcggtgaaagtgtttcaccgaccatggaggaggggatggcacttctacgacgaccgcgaattcatttatctcagacctttcgcctgtgacactaaacttgagtgggtctgtcagatcccaaagggaaggactccaaagaccccagattggtacaatcctgatagggcgggcatccatggtccacccttgatcattgaaggtagcgagtactggttcgtggcagatctccacctgaattacgaggaagctgtcctttactgtgctagcaaccacagtttcctcgccaccatcaccagttttgtcggcctaaaggctatcaagaataaaatcgctaacatctccggggatgggcagaaatggtggattcgcatctctgagtggccgatcgacgaccactttacatactctcggtacccctggcaccggttccctgttacatttggagaggagtgtctctatatgtctgccaaaacctggcttatcgatctcggtaagcccacagattgctcgactaaacttccattcatatgtgagaaatataacgtgtcatcccttgaaaaatattcccctgactctgccgctaaggtgcagtgtagcgagcagtggatacccttccagaacaagtgctttttaaaaataaagcctgtcagcctgactttttcccaagcgtcagatacatgccacagttacggcggcaccctgcccagcgtcctgtcacagattgagcaggatttcatcacgagtctgctcccggatatggaggcaacactatggatcgggttgcgctggacagcctatgagaagatcaataagtggaccgacaatagagagctcacttattctaacttccacccattgctggtttcaggtcggctgcgcatacccgagaactttttcgaggaggaaagcaggtaccactgcgcactgatactgaacctgcagaagagccccttcacaggaacgtggaactttacttcatgctccgaaaggcacttcgtctcattgtgtcagaagtactccgaagttaaatcgcggcaaactctgcagaacgctagcgaaaccgtgaagtacttgaataacttgtacaaaatcattcctaagacccttacctggcattcagcaaaacgcgagtgtctgaaatccaatatgcagctcgtgagtattaccgacccctatcagcaggccttcctgagcgtgcaggccctccttcacaacagctcgctgtggattgggctcttttctcaggatgacgagctgaacttcggttggtccgacggcaagagattacacttcagtagatgggccgagacaaatggccagctggaagattgcgtagtcctggatacagacggtttttggaagaccgtggactgcaatgataatcagccaggcgccatctgctactactccggaaatgagaccgaaaaggaggttaaacctgtcgatagcgtcaagtgcccaagccccgtgctgaataccccttggatacccttccaaaactgttgttataattttatcatcacaaagaacaggcacatggcaaccacacaggacgaagtacataccaaatgtcaaaaacttaaccccaaaagccatatactctccatccgggacgaaaaagaaaacaattttgtgctggaacagctgctttattttaattacatggccagttgggtgatgcttgggattacatacaggaacaagagcctcatgtggtttgataagacccctctgagctatacacactggagggccggacggcccactattaaaaacgagaagttcctggctggactctcaactgacggattctgggatatccagacttttaaggttatcgaggaggccgtctacttccaccagcatagtatcctggcctgtaagattgagatggtagattataaagaagagtacaacactactctgccgcagtttatgccttatgaggacggcatctattcagtcatccaaaagaaagtcacttggtacgaagccctgaatatgtgctcgcagagtggaggccatctcgcatcagtgcataatcagaatggccagctgtttctcgaggacatagtcaagcgcgacggatttcctctctgggtaggattgtctagtcatgatggctccgagtctagctttgagtggtccgacggctcaaccttcgactatatcccctggaagggtcagacatcacccggaaattgcgttctgctggatccgaagggaacctggaagcatgaaaagtgtaactccgtgaaggatggggccatttgttacaagcctactaaatctaagaagctgtccaggttgacatacagcagtcggtgccccgcagctaaagaaaatggatcaaggtggatacagtataaggggcattgttataagagtgatcaggctctgcacagcttcagcgaggctaagaagctgtgcagtaaacacgatcatagcgccactattgtatccattaaagatgaggacgagaataagtttgtcagtaggttaatgcgggagaacaataatatcaccatgcgggtatggctgggactgagccagcactccgtggattgtccctcttctacctggatccaattccaagactcctgctatatatttctccaggaagcgataaaagtggaatctatcgaggacgttaggaatcagtgtacagaccacggtgccgacatgatatccattcacaacgaggaagagaacgcctttatactggacaccctgaagaagcagtggaaaggcccagatgacattcttctcggaatgttttacgatacagacgacgcaagcttcaagtggtttgataacagcaacatgacctttgacaagtggacagaccaggatgacgatgaggatttagtggatacatgtgccttcttgcacatcaagactggggagtggaaaaaagggaactgtgaagtttcatccgttgaggggaccctgtgcaagacagccataccctataagcggaagtatctgtctgacaaccatatcttgatttctgctctggtgattgccagcacggtaattctgacagtgttgggtgcgatcatatggttcttatataagaagcattcagattcacggtttaccactgtcttttctaccgccccccagagcccctacaacgaagactgcgtgctcgtcgtgggcgaagagaatgaatatccagtgcagttcgattag

SEQ ID NO: 346 - DNA, 5622 bp, Artificial Sequence
  Description of Artificial Sequence: Synthetic Transcript Sequence
atgcggaccggctgggccaccccccggcggcccgccggcctgctgatgctgctgttttggtttttcgacctggccgagccttcagggagggcagctaacgaccccttcacgatcgtgcacggtaatacgggcaagtgtattaagcctgtttacggctggattgtggctgatgattgtgacgagaccgaggataaactgtggaagtgggtgtcacagcacaggctgttccacttacactctcagaagtgtctgggccttgacataacaaaatccgtaaacgagctccggatgttcagctgcgattcttcagctatgctgtggtggaagtgcgagcaccactccctttatggtgccgctcgatacagactggccttgaaggacgggcacggcactgcaattagtaatgcatccgatgtgtggaagaaggggggaagcgaggaatccctttgtgaccagccatatcatgagatttatacgcgagacggtaatagctatggccgaccttgtgagtttccctttctgattgacggcacctggcatcacgactgcatcttggatgaggatcatagtggcccttggtgcgctacaactttgaactacgagtatgatcgaaagtgggggatctgtctgaagccagaaaacgggtgcgaggacaactgggaaaagaatgaacagtttggatcctgttatcagttcaatacacagacagctctgtcttggaaggaagcctacgtgagctgtcaaaatcagggggccgaccttctgtccatcaactctgcggcagagttgacctacttgaaggaaaaagaaggcattgctaagatcttttggatcggactgaaccaattgtatagtgctcgaggctgggaatggtccgaccacaaacccctcaacttcctgaactgggatcctgatagaccctctgctcccacaatcggaggtagcagttgcgccaggatggatgcggagtcaggactttggcagagcttctcctgtgaggctcagttgccttacgtgtgcaggaaacccctgaacaacacagtggaattgaccgacgtgtggacgtacagtgatacccggtgtgatgcgggttggcttccaaacaacggcttctgctacttgttggttaacgagtctaattcctgggacaaggcccatgccaaatgcaaggcattcagttctgacttaataagcatacactctttggccgacgtggaagtggtggtcacgaaactccataacgaagacataaaggaggaggtgtggattgggttaaagaatatcaacatccccactctgtttcaatggtctgatggaaccgaagtcaccctcacctactgggatgagaatgaacctaatgtgccgtacaataagacccccaactgtgttagctatttaggagaactcgggcaatggaaggtgcagagctgtgaagagaagctcaagtacgtgtgcaaacgaaaaggcgaaaaactaaatgatgcttctagcgacaagatgtgccctcctgacgagggctggaaacgtcatggggagacgtgctataagatctacgaggacgaggttcctttcgggacaaactgtaacctcacaattacctccagatttgaacaagaatacctgaatgatctcatgaaaaagtacgataagtccctgaggaaatacttttggacaggactccgagacgttgactcctgtggggagtacaactgggctacagtcgggggtagacgcagggccgtgactttcagtaactggaattttctcgaacccgcctccccagggggctgtgttgcgatgtcgacaggcaaatccgtgggaaagtgggaggttaaggattgtcgatcatttaaggcactgtcgatctgcaaaaaaatgtccggccctcttggaccagaggaggctagtccgaagccggacgatccttgccccgaggggtggcagagcttccctgcatcactgagttgctataaagtctttcacgctgagcgcatcgtgcgcaagagaaactgggaagaggcggagcggttttgtcaagcactgggcgcccatttatcaagtttttcccatgtagatgaaatcaaagaattcttgcattttctaacagaccagtttagcgggcagcactggctctggattggacttaataaaaggtcccccgacttgcaagggtcctggcagtggagtgacagaacccctgtttctaccatcataatgccaaacgagttccaacaagattatgacattcgggactgcgccgcagtcaaggtattccatagaccctggagaaggggatggcacttttatgacgatagagagtttatttatctgaggccattcgcctgtgatacgaagctagaatgggtttgccaaatccccaaaggaaggacccccaagacccccgactggtacaaccccgacagagcaggaatccacggaccaccccttataatcgaagggtctgagtattggtttgttgccgatctgcacttaaattacgaggaagcagttttgtactgcgccagcaaccattcttttctcgctaccatcacatctttcgtaggcctgaaagccatcaaaaacaagatcgctaatatatccggagacgggcaaaaatggtggatcagaatttcagaatggccaatcgacgatcacttcacttatagcaggtacccatggcatcgctttcctgtgaccttcggcgaagagtgtctgtacatgtcagctaaaacctggctgatcgacttgggtaagcccactgattgctccacaaaactgccatttatttgtgagaaatataatgtcagttcgctcgaaaagtactctcctgattccgccgccaaggtccagtgttccgagcaatggatccccttccaaaacaagtgctttttgaaaattaagccggtcagccttacatttagtcaagcttctgacacatgtcattcctatggtggcactctgccctccgtcctgtcacagattgaacaagactttatcacttccttgctgcccgacatggaagccacactttggattggcctccggtggacagcttacgaaaaaatcaataaatggaccgacaatagggaactgacttattcaaattttcatcctctcctagtttctggcaggctgcgtatacctgaaaacttttttgaagaagagagtcgctatcactgtgctcttatactgaatctgcagaagagcccctttaccggaacatggaactttacttcatgcagcgagcgtcacttcgtgtccctatgtcagaaatactcagaggtcaaatccaggcaaacacttcagaacgccagcgagaccgtgaagtacctgaacaatctatacaagatcattccaaagacattgacttggcattccgccaagagagagtgcctgaaatctaatatgcagttagtctccatcaccgatccctaccaacaggcgttcctgtctgttcaggcgctgttacacaactcctctctttggatcggccttttctcacaggatgacgagctgaactttggctggagtgatggcaaacggctccactttagtcgctgggctgagacaaatggccaacttgaggactgtgtcgtactcgacaccgacggcttctggaagacagtggactgtaatgacaatcaacctggagccatatgttactacagtggtaatgagaccgagaaggaggtgaagccagtggacagtgtcaagtgcccgagcccagttctcaatacaccctggatcccatttcagaattgctgttataacttcatcatcaccaaaaacaggcatatggcgacaacccaggatgaagttcacaccaagtgccagaagctgaatcccaagagtcacatcctatcaattagagacgagaaggagaacaactttgtccttgagcagctgctgtactttaactatatggccagctgggtgatgctgggcataacataccgtaacaagtctctaatgtggtttgacaaaactccattgtcttacactcactggcgcgctggccgccctacaattaaaaacgagaaatttctggcgggcctatctactgacggtttttgggacatacagaccttcaaggtcatcgaggaagctgtgtacttccaccaacactcaatactcgcatgtaagatcgaaatggtagattacaaagaggagtacaacaccacattgcctcaattcatgccctatgaggacggcatttacagcgtcatccagaagaaagtgacgtggtacgaagccttgaacatgtgctctcaatctggtggacacttagccagcgtgcacaatcagaacggtcaactgttcctggaagacattgtgaagcgagatggatttcctttgtgggtcggtttgagctcacatgacgggagtgaatcatcctttgagtggtccgatggctcgacgttcgattacataccttggaagggacagacctcccctgggaattgcgttctgcttgacccaaaaggtacatggaaacacgagaaatgcaacagcgtgaaagatggtgcaatctgttacaaacctaccaaatcgaagaagctctctcgtttaacctactctagccgatgcccggctgctaaggagaacggtagcaggtggatccagtacaagggccattgttacaagtcagaccaggccctgcacagtttcagtgaggctaaaaaactctgtagcaaacacgatcatagcgcaactatagtgtctatcaaggacgaggacgagaacaagttcgtgtctcgcctgatgcgcgagaacaacaacattactatgagagtgtggctcggcctgagtcagcatagcgtcgatcagtcctggagctggctggacggctccgaagtaacatttgtgaaatgggagaataagagtaagtctggcgtgggtcgttgtagcatgctgatcgcgagcaatgagacctggaagaaagtcgagtgcgaacacgggtttggcagagtggtgtgtaaggtccctctcgactgtccttcctctacttggatccagtttcaggattcctgctacatcttcctccaggaagccatcaaagtggaatcaattgaagacgtgcggaaccaatgtacagaccacggagctgatatgatttccatacacaacgaagaagagaacgctttcatcttagatactctcaagaaacagtggaagggcccagatgatatcctgctaggaatgttttatgatacggatgatgcgtctttcaagtggtttgacaacagcaacatgacattcgataagtggaccgaccaggacgatgacgaagatcttgtggacacgtgtgcttttctgcatataaaaaccggggagtggaaaaaagggaattgtgaggtaagctctgtagaaggtaccttgtgcaaaaccgctattccgtacaaaagaaaatatctctcggacaatcacatcctcatctccgccttggtcattgcctcaacagtgatcttgaccgtgctgggtgctatcatctggtttctttataagaagcacagcgacagccggtttaccacagtgttctccacagcgccccagagtccctacaacgaggattgtgtcctggtcgtgggggaggaaaacgagtaccccgtgcagttcgattag

SEQ ID NO: 347 - DNA, 186 bp, Artificial Sequence
  Description of Artificial Sequence: Synthetic Transcript Sequence
atgaagcggttcctgttcctgctgctgaccatcagcctgctggtgatggtgcagattcagacaggcctgagtggacaaaatgacacatcacaaaccagctctcccagtgcgagtagcaacatttcagggggcatctttcttttcttcgtcgcaaacgcgattatacatttgttttgtttcagttag

SEQ ID NO: 348 - DNA, 1062 bp, Artificial Sequence
  Description of Artificial Sequence: Synthetic Transcript Sequence
atggagctgaccgagctgctgctggtggtgatgctgctgctgaccgccaggctgacattatcatcacctgcgccgcctgcctgcgacttgagagtgctgtctaagttgctgcgggactcccacgttctgcacagccgcctctcccaatgtcctgaggttcacccccttccaacccccgtgctactgcctgccgtggactttagtctgggagaatggaagacacagatggaggaaacgaaggcacaggatatcttaggcgccgtgaccctcctgctggagggagtgatggccgcccgaggccaactcggtccaacttgcctgtcctcactgctcggccagctgagcggccaagtccgcttgctccttggggctctccagagtctgctcgggacgcagctccccccccagggtcgaaccactgcccataaggatcctaatgccatttttctgtcatttcagcatcttctgagaggtaaagtcagattcctgatgttggttggtggcagcacactgtgcgtgaggcgggccccgcctaccacggccgttcctagtcggacctccctggtgctcacgttgaatgagctaccaaatcgtacatcagggctccttgaaacaaatttcaccgccagcgctagaactacaggcagcggcctcctcaaatggcagcagggttttagagctaaaatccccggactgttgaatcagacctcccgctccctcgaccagatcccaggttacctgaataggatacatgagctcttgaatggaactagaggtctgtttccagggccaagtagacggacactgggagcccctgacatctcttctggaacttcagatacggggagcctcccgccaaatcttcagcccggctattctccctctcctacgcaccccccaaccggacagtacacattattcccgctgcctccgaccctaccaaccccagtggtccagctccaccccctactcccagatccttcagcccccaccccgacacctacgtcccccctgctgaacacctcatacactcactcacagaatcttagtcaggaagggtag

SEQ ID NO: 349 - DNA, 537 bp, Artificial Sequence
  Description of Artificial Sequence: Synthetic Transcript Sequence
atgaccgtgctggcccccgcctggagccccaccacctacctgctgctcctgctgctgctcagcagtggcctctcaggcacccaagactgttcttttcagcattcaccaattagttcagattttgctgtgaaaattcgggagcttagcgactatctgctccaggactatccagtcaccgtcgctagtaatctgcaggatgaagaattgtgcggcggactgtggcgcctcgtgttagctcagcgttggatggagcggctcaagacagtggccggttcaaagatgcagggcctgctggagcgggtgaacacagaaatccactttgtgaccaaatgtgcctttcagcctcccccatcatgcttgcggttcgtccaaacaaacatttcaaggctgttacaggaaacgtcagagcaactggtcgctctgaaaccatggatcactcgtcagaacttttctaggtgtctcgaactccagtgccagccagttgaaaccgtctttcatcgagtctctcaggacggcctggacctactgacttcgtag

SEQ ID NO: 350 - DNA, 708 bp, Artificial Sequence
  Description of Artificial Sequence: Synthetic Transcript Sequence
atgaccgtgctggcccccgcctggagccccaccacctacctgctgcttttactcctcctgtcttcaggtctgagcggcacccaggattgtagctttcaacactctccaatcagctccgattttgccgtgaagatcagagagctgagtgattacctcctgcaagactatcccgtgacagttgcgtcaaatctgcaggacgaagaactttgcggggggctctggaggctggtgcttgctcaaagatggatggagcgactcaaaaccgtcgcgggctcaaagatgcaggggctcctggagagagtcaacaccgagatccacttcgtgaccaagtgtgcattccagcctcccccttcatgtctccgcttcgtgcagaccaacatcagtaggctcctccaagaaacatcagaacaactggtggctctaaaaccctggatcactcgccagaacttctctagatgtcttgagctgcaatgccagcctgattcatccacccttcctcctccatggagtccgcggcccttggaggcaactgcccccacagctccccagcctccattgctgttgctcctccttctccctgttggcttactcttgctggccgccgcatggtgtctgcattggcagcgaacccgtagaaggaccccgagaccaggcgagcaggtgcctcctgtgcccagtcctcaggacctccttcttgttgaacattag

SEQ ID NO: 351 - DNA, 1110 bp, Artificial Sequence
  Description of Artificial Sequence: Synthetic Transcript Sequence
atggtgtgggcccccctgggccccccccggaccgactgcctgaccttgctccatacaccctctaaagactctcccaagatgagcttagagtggttggtggcctggtcctggagcctcgacggtttacgggactgcattgccaccggtatccagtcagtgagagattgtgacaccaccgccgtgatcacagttgcctgtttactcgtgctgtttgtgtggtattgctatcatgtgggcagggaacagccacggccttatgtcagcgttaactctttaatgcaagccgcagacgccaatggcctgcagaacgggtatgtctattgtcaaagtcctgaatgcgttcggtgtacccataatgagggactgaatcagaagttataccataatctgcaggagtatgcgaaacggtatagctggtctggcatggggcgaatccacaaaggaatccgagaacagggccggtatctaaacagcagaccctcaatacaaaagccggaggtatttttcctgcctgatctcccaacaaccccttatttctctcgggatgcccagaaacatgacgtagaggtgctggagcggaactttcagacaatcctgtgcgagtttgagactctttataaggcattctccaactgctcactgcctcaggggtggaaaatgaacagcacccctagcggagagtggttcaccttctaccttgtgaaccagggcgtttgcgtgcctcgaaattgtagaaaatgccctaggacgtataggctcctcggttcactgagaacctgcatcggaaacaacgtgttcggaaacgcctgtatcagtgtcctgtcaccagggacagttattactgagcactacggaccgacaaatattcggatacggtgtcacctgggcctgaagacacccaacggctgtgagctcgtcgtgggcggggaaccccaatgctgggccgaaggacggtgtttgttatttgacgattcattccttcatgccgccttccacgaagggagtgccgaagacggccctagagtcgtcttcatggtggacttgtggcatcccaatgtggcagcagctgagcggcaggccctggacttcattttcgcccctggcagatag

SEQ ID NO: 352 - DNA, 1989 bp, Artificial Sequence
  Description of Artificial Sequence: Synthetic Transcript Sequence
atgcggccccagatcctgctgctgctggccctgctgaccctgggcttggccgcccaacatcaggacaaggtcccatgtaagatggtggacaagaaggtgtcgtgccaggtacttggccttctccaggtgccttctgtgcttcctcccgacacagaaacacttgatcttagtgggaaccagctacgtagtatcttggcaagtcctctcggattttataccgccttacgtcatttagacttaagcactaacgagatcagctttcttcagcccggtgcctttcaggctctaacgcacctcgagcatctgtctctggcccacaaccgactggctatggcaacagccctgagcgcgggaggactcggaccactgccacgagttacctccctggacctcagcgggaattcactctactctgggctcctggaaagattattgggggaggctccctctctccacacccttagcctggccgaaaacagtttgactagactgactcgccacaccttccgcgacatgccagccttggaacagttagatctccattccaacgtgctgatggacatcgaggacggcgcatttgaggggttgcctagattgacccacctgaacctgagccgcaacagcctaacttgtataagcgacttttccctgcagcagctccgggtgcttgacctcagttgtaatagtatcgaggcctttcagaccgctagtcagcctcaggctgagtttcaactgacctggctcgatcttcgggaaaacaagcttcttcattttccggatctggccgccctcccgaggcttatttacctgaatctgagtaacaatctgattcgtctccctacggggcctccccaggactcgaagggcatccacgccccttccgagggatggagtgcgctgcccttgtctgccccaagcggcaatgccagcggacgtcccctttcgcaactgctcaatctggatctgtcgtataatgaaatcgaactgatccctgacagttttttggagcacttgacatctctgtgctttttgaatctgagcaggaactgcttaagaacatttgaagccaggcgattggggagcctgccatgtttaatgctgcttgacctgtctcacaatgctctggagactttagagctaggggcgagagcccttggtagcctccggaccctgcttctgcagggaaacgctcttcgcgacctgccaccatatactttcgcaaacctggccagtctgcagcggttaaatcttcagggaaatagggtaagtccctgtggagggcctgacgagcccggccctagcggctgtgtggcattcagcgggatcacatctctaagatcattgagtctggtcgacaatgagatcgaactcttacgagccggagctttcctgcatacgcccctgaccgagctcgacctcagttccaacccgggattggaggtggccacgggcgccttggggggactggaagcctcactcgaagtcttagctctacaaggtaacggactgatggtcctgcaggtggatctaccttgcttcatctgcttaaagaggttgaatctagcggaaaaccgactgagccacctgccagcctggacccaagctgttagtctggaggtcctcgatctgaggaacaactcatttagtttactgcccgggagcgccatgggaggcctcgaaacgtccctgcggcgcctgtacttacagggaaatcccttgtcctgctgcgggaacggttggctggccgcacaacttcatcagggaagagttgacgtcgatgccacccaagacctgatttgcagattcagctctcaggaggaggtgtccctttcccacgttaggcccgaggactgcgaaaaaggcgggctgaaaaatattaatttgatcattattctgacttttatcctcgtgtcagctattcttttaacgacgctagctgcatgttgttgcgtgcgcaggcaaaagtttaaccagcaatacaaagcttag

SEQ ID NO: 353 - DNA, 1989 bp, Artificial Sequence
  Description of Artificial Sequence: Synthetic Transcript Sequence
atgcggccccagatcctgctgctgctggccctgctgaccctgggccttgcagcgcaacatcaggacaaggtcccttgcaagatggtcgacaagaaggtttcttgccaagtgctgggcttgctccaagtgccttcggtgctgcctcccgacacggagactctggaccttagtggtaaccagctgcgctccattctagcttccccactcggcttctacaccgcattgcggcacttagatctcagtaccaatgaaatctcttttttgcaacctggtgccttccaggcactcacccatttggaacacttaagcctggcccacaaccgactggccatggctacggccctgtctgccggggggctgggacctttaccacgtgtgactagtcttgacctgtctggcaatagtctgtatagtggcctcctggaacggctcctcggagaggccccttccctgcacactctgtcgctcgctgaaaattcccttacacgcttgaccagacacacctttagggacatgccagcactcgagcagctcgacttgcattcaaatgtgctgatggacattgaagacggggcgtttgaggggcttccaagacttacccacctgaacctgagccgaaattcactcacttgtattagcgattttagcctccagcagctacgtgtgcttgatctatcgtgtaactccattgaggccttccagacagcatctcagcctcaggccgaattccaactgacctggttagatttgcgcgaaaataagttgctccattttccagacctagctgccctgcctagactgatttacctgaacctgtctaataacctcattcgactacctaccggcccccctcaagactcaaaaggaattcacgctcctagcgaagggtggtcagccctccctctgtctgctccttctggcaatgcctccggccgcccactgagccagctgctgaacttggatctgtcctataatgagatagagctgatccccgatagctttctggaacacctaacctctttatgttttctgaatctcagcagaaattgtctccggacctttgaagccagaaggcttggaagcttgccctgtcttatgttactcgatctttctcacaacgccttggagaccctcgagctgggggcccgtgctctgggctctctgcgcactttgctgctacaaggaaacgctctgagagatctgcccccttacaccttcgcaaatcttgcctctctgcaacgactgaacctgcagggaaatagggtctctccatgtggagggccggatgaaccaggccccagcggctgcgtcgccttcagtggaataaccagtcttcgcagcctcagcctggtcgacaatgaaattgagctgcttagggctggagcttttctgcacacaccgttgacagaattggatttaagtagtaatcctgggctcgaagtggctactggggcactggggggactcgaagcgagtctggaagttttggcactccagggcaacgggctgatggtgctgcaggtggacctgccgtgttttatatgcctgaaacggctcaaccttgcagaaaataggctgagccatctgcctgcctggacccaggcagtgagcttagaagtcttagacctgaggaacaacagcttcagcctgctgcctgggagcgccatgggcggtctggaaacctcattacggagattgtatcttcagggaaatcctctctcatgttgtggcaatggctggctagcggctcagctgcaccagggtcgagtcgacgtggacgccacacaggatctgatatgccggttctccagccaggaagaagttagcctgtctcatgttcggcccgaggattgtgaaaagggtggcttgaaaaatataaatttaatcatcattctgacatttatattagtttctgcaattctcctgacaacattggcagcttgctgctgtgtcaggagacagaagttcaatcaacagtataaggcttag

SEQ ID NO: 354 - DNA, 1989 bp, Artificial Sequence
  Description of Artificial Sequence: Synthetic Transcript Sequence
atgcggccccagatcctgctgctgctggccctgctgaccctgggcttggcagcccaacaccaggataaagtgccttgtaagatggtagacaaaaaggtgtcctgtcaggtgttaggtttactgcaagttccttctgtgcttccaccagatacggaaactctggatctctctggaaaccagcttcggagcatcctggctagcccattgggcttctatactgccctgcggcatctggacctgagtaccaatgagatcagctttctacagccgggagctttccaggctctgactcatctagaacatttgtcactggcacacaacagattggccatggctaccgcactgtcagcaggtggcttggggccgctaccccgagttacaagtctggacttatctgggaattcactctattccggcctgctggagcggctgttaggggaagcccctagcctccatacccttagtctggccgagaactctttgacccgcttgacgaggcacacttttcgcgacatgcctgccttggaacagctagacctccatagcaacgttttgatggatattgaggacggggccttcgaggggctgcctcgcctgacccatctgaacttgagccggaattcccttacctgtatttccgacttcagtctgcagcagctgagagtgcttgacctatcctgcaattctatcgaagcctttcagacagcgagccagccccaggctgagtttcagctgacctggttggatctgcgcgagaataagttgctgcattttccagacttagccgccctccctagacttatctatctcaacctttcaaataatttgattcgactccctaccggccctccacaggactccaaaggcatccatgccccctcggagggatggtccgcactgccactttcggcgccctcaggcaacgcttccggccgtcccctgagtcagctgctgaatttggacctcagctacaatgaaatcgagctcattcctgattcgtttttggaacacctaacaagtctgtgcttccttaatctcagccgcaattgtctgaggacttttgaggcccgtcggctgggtagcctgccctgcctgatgttactagacctgtcgcacaacgcgttagagacattagagctcggagcaagggcactgggatctctgcggacactcttactgcagggcaacgcattgcgcgacctccctccatacaccttcgccaacttggcttcacttcagcggttgaatctccaaggaaatcgagtgtcaccttgcggcgggccagatgagcccggaccgagtggatgcgtggcatttagcgggatcacgtcgctgaggagcctgtcactggttgacaatgagatcgagctcctcagagcaggagcatttctacacacgcctctaacagaattagatctgtccagtaaccccggactagaagtggctactggcgcactgggtggcctggaagcaagtctggaagttctcgcacttcaggggaacggactaatggtgctacaggtcgacctgccctgcttcatctgtctgaaaagactgaacttggccgagaataggcttagtcatcttcctgcctggactcaggccgtatcattagaggtgctggacctgcggaataattccttttcgctcttgcctgggagtgcaatggggggcctcgagaccagcctccgtagactatacctacaggggaatccattatcgtgctgcggaaacggatggctggccgcccagctgcatcaaggacgcgtcgacgtggacgcaacacaagacttaatctgccgctttagttcccaggaggaagtaagcttatctcatgtccggccagaagactgtgagaaggggggcctgaagaacataaacctgattattatccttacctttatcctcgtttcagctattttacttacaaccctcgctgcctgttgctgcgtcaggagacaaaagttcaaccagcaatataaagcctag

SEQ ID NO: 355 - DNA, 561 bp, Artificial Sequence
  Description of Artificial Sequence: Synthetic Transcript Sequence
atgcggccccagatcctgctgctgctggccctgctgaccctgggcctggctgcacagcaccaagataaggtgccatgtaagatggttgacaaaaaggtgagctgtcaggtattaggcttgcttcaagttccctcagttctccctcccgatacagagacgctggatctgtccgggaaccagctccgctcgattctcgcttccccactgggattctacacagccctgcgtcacttggacctctcgactaacgagatcagcttcctccagccaggtgcctttcaggcattgacccacttggagcacctgtctctagcgcataacagacttgctatggcaactgctctgtcagctggcggtctgggacctcttccgcgcgtcacatcgttggatctcagtgggaactcattatacagcggcttactagagcgcctgcttggagaagcgccctcactgcataccctatcacttgctgagaattcactgactagactgactcgacacacctttagggacatgccagcactcgagcagctggacctgcacagcaatgtcctgatgtag

SEQ ID NO: 356 - DNA, 1212 bp, Artificial Sequence
  Description of Artificial Sequence: Synthetic Transcript Sequence
atggcccacgccatggagaacagctggaccatcagcaaggagtaccacattgacgaggaggttggatttgcccttcctaaccctcaggaaaacttaccagatttctacaacgactggatgttcatagcgaaacacttacccgatttaatcgaatcggggcaacttcgggaaagggtcgagaaacttaacatgctgagcattgaccacttgactgatcacaagtcacaaaggctggcaagattggtgctggggtgtatcaccatggcatacgtgtggggaaaaggccatggcgatgtgcgcaaagtcctgcctcgaaacatcgctgtgccctattgtcagttatctaaaaagctggagctgccccctattctggtgtatgccgattgtgtcctcgccaattggaaaaagaaggatccgaataagcccctgacgtatgaaaacatggacgtcctcttctccttccgtgacggcgactgctctaaaggcttctttctggtgtctctgctggttgagatagcagcagcttccgccattaaagttattccaacagtgtttaaggccatgcaaatgcaggaacgtgatactttgctgaaagcactgttggaaatcgcatcttgcctggaaaaggctctacaggttttccatcagatccacgatcacgtgaatcccaaagcctttttcagtgtgttgagaatctatcttagcgggtggaaaggaaaccctcagctgagtgacgggctcgtgtatgaagggttttgggaggatcccaaggagtttgctggggggtcagcaggacaatcaagcgtgtttcagtgcttcgacgtcctgctgggaatccagcaaactgctggtggtgggcacgctgctcaattcctccaggacatgcgtcgctacatgccaccagcccacaggaattttctgtgttccctcgagagcaacccctccgtgcgggagttcgtgctgagtaagggagatgcagggcttcgcgaagcatatgacgcatgtgtgaaagccctggtaagcctgcgctcataccatctgcagatcgtgacaaagtatatcctgatccccgcatcacagcagcccaaggagaacaagactagtgaggacccgtccaagttggaagccaaaggtacaggcggaaccgacctgatgaatttcttaaaaacagtcaggtcgacaactgaaaaaagcctgctgaaggaaggctag

SEQ ID NO: 357 - DNA, 237 bp, Artificial Sequence
  Description of Artificial Sequence: Synthetic Transcript Sequence
atggcccacgccatggagaacagctggaccatcagcaaggagtaccacattgacgaagaagtgggttttgcactgccgaatccccaagagaacctccctgacttctacaacgattggatgttcatagcgaagcacctccctgacctcattgagtctggtcaactgcgtgagcgggtcgagaagctcaatatgctgtccattgatcacttgaccgaccacaaaagtcaacgcctgtag

SEQ ID NO: 358 - DNA, 543 bp, Artificial Sequence
  Description of Artificial Sequence: Synthetic Transcript Sequence
atggcccacgccatggagaacagctggaccatcagcaaggagtaccacattgacgaagaggtcggctttgccctgccaaacccccaggaaaatttgccagacttctacaacgactggatgttcattgccaaacacctccccgacttaattgagtccggacagctgcgcgaaagggtggagaagctgaacatgctcagcattgatcacctgacagaccataagagccagagactggcgaggctggtcctgggttgtatcaccatggcctacgtttggggcaaaggccacggcgacgtgaggaaagtccttcctaggaacattgccgtgccttattgtcagctctccaaaaagctggagttgccacctatcctcgtgtacgccgattgtgtgctagcgaactggaagaaaaaggatcctaataagcccttaacgtatgaaaatatggacgtgctgttctctttcagagatggcgactgcagtaaaggattttttctcgtcagcctactggtggagatcgcagctgcctctgccatcaaagtgtag

SEQ ID NO: 359 - DNA, 1212 bp, Artificial Sequence
  Description of Artificial Sequence: Synthetic Transcript Sequence
atggcccacgccatggagaacagctggaccatcagcaaggagtaccatattgatgaagaggtcggcttcgctctgccaaaccctcaagaaaacttacccgacttttacaatgactggatgttcatcgccaaacatctgcctgatctaattgagtcagggcaattgcgtgaacgggtcgagaaactgaacatgttgagcattgaccatctcacggaccataagagtcaaaggctggcccggctggttctgggatgtattacgatggcctatgtgtggggcaagggccacggcgatgtgcgcaaagtgctgcctcggaacatagcagtgccctactgtcagctgagtaagaaacttgaacttccaccaatcctcgtgtacgctgactgcgtgctcgccaattggaaaaagaaagaccccaacaagcccctcacttacgaaaatatggatgtcctgttctctttcagggatggtgactgctcaaagggctttttcctagtgtcgttactcgttgaaattgctgccgcatcagcgatcaaggttattccgaccgtctttaaagcaatgcagatgcaggaacgggacactctgctcaaggccctgctggagatcgccagctgtctggagaaagcccttcaagtcttccaccagatccacgatcacgttaacccgaaggcgttcttttcagtgttacggatttacctttctggttggaagggtaatcctcagctatcggatggattggtctatgaggggttttgggaagaccccaaggagttcgccgggggcagcgctggccaaagctcagtcttccagtgctttgatgttctgctgggcatccagcagaccgctggcggaggacacgctgcccagttcctgcaagacatgcgacgctacatgccaccagcccaccgcaatttcctgtgctctttagaatcgaatccatctgtaagggaattcgtgcttagcaagggggacgctggactccgggaagcttatgatgcttgcgtcaaggcacttgttagcctgaggagttaccatctgcagattgtgacaaaatacatcttgatcccggctagccaacagcccaaggagaacaaaacgtctgaggaccctagcaagctggaagctaaagggacaggcggtaccgacctcatgaatttcctgaagacggtgcggagtaccacggaaaagtcattactaaaggagggctag

SEQ ID NO: 360 - DNA, 144 bp, Artificial Sequence
  Description of Artificial Sequence: Synthetic Transcript Sequence
atggcccacgccatggagaacagctggaccatcagcaaggagtaccacatagacgaggaggtgggtttcgctctgcctaatccacaagagaaccttccggatttctacaacgattggatgttcattgccaaacatctgccttag

SEQ ID NO: 361 - DNA, 1224 bp, Artificial Sequence
  Description of Artificial Sequence: Synthetic Transcript Sequence
atggagccccaccggcccaacgtgaagaccgccgtgcccctgagcttggaatcctatcacatcagcgaagagtatgggttccttttgcctgacagcctgaaagaattacccgatcattatcgaccatggatggaaattgccaataaactgccacagctaatcgatgcccatcagttgcaggcgcacgtagataagatgcccttacttagttgtcagttcttgaaaggccatcgagaacagcggctggcccaccttgtgttgagcttccttaccatggggtatgtgtggcaagaaggcgaagcccagcctgcagaggtcctgccacggaacttggcactccccttcgttgaagtgtcacgaaacctagggctgcctcccatcctggttcacagtgacctggtcctgacaaactggacaaagaaggatcctgacggctttctagagatagggaacctggagaccattatatctttccctggaggagagtcactgcatggcttcattttggtgaccgccctggttgagaaagaggcagtgcctggtatcaaagctctggtccaggccaccaacgctatcttacagcctaatcaggaagctctccttcaagccctacagcgtctgaggttaagcattcaggatattactaagaccctgggtcagatgcacgactacgtggaccccgacattttctacgcgggaatacgcatcttcctgtcgggctggaaggacaacccggccatgccagctgggttaatgtatgagggagtctcacaagaacctcttaaatactctgggggcagtgctgctcaaagcaccgtactgcatgctttcgacgagttcctgggaatcagacacagcaaggaaagcggcgattttttatatagaatgcgcgattacatgcctccctcccataaggcttttatagaggacatccattcagcaccgagcttgagggactacattctctcctctggccaggatcatctcttgactgcgtataaccaatgcgtccaggccctggccgaactcaggtcataccatataactatggtgactaagtatcttataactgcggcggccaaagcgaaacacggtaaacccaaccatcttccaggacctccacaggcgctcaaggacagaggtaccggaggaactgctgtgatgtccttcttaaagtctgtaagggacaaaacgctcgaaagcatcctgcaccctaggggatag

SEQ ID NO: 362 - DNA, 1263 bp, Artificial Sequence
  Description of Artificial Sequence: Synthetic Transcript Sequence
atgctgcacttccactactacgacaccagcaacaagatcatggagccccacaggcccaacgtcaagactgctgtccccctgtctcttgagagctaccacatctcagaggagtacggttttctgctgccagactctttaaaagagttaccagaccactaccgaccttggatggagatcgctaacaaacttccccagcttattgacgcccaccaactgcaggctcacgtggataagatgcctttactgagctgccagtttctcaaaggccaccgggagcagcgacttgctcatcttgtgctgtcctttctaactatgggatacgtttggcaggagggggaggctcagcccgccgaggtgctgccacggaacctcgccttgccttttgttgaggtatcccgcaacctcggcttgcctcccattctggtccactccgaccttgtgctgacaaactggaccaaaaaagaccccgatggcttcctcgagattggcaacctagaaacaatcatctctttccccggaggcgaatccctgcatggattcatcctggtcaccgctttggtagaaaaggaggccgtgcctgggattaaggcactggtccaagcgacaaatgccattcttcaacctaaccaggaggccctgcttcaggccttacagaggctgcggttatccattcaagatattactaaaaccctgggccagatgcacgactacgttgatccggatatcttttacgcagggatccgtatcttcctgagtgggtggaaagacaaccctgccatgcctgcaggattgatgtatgagggagtgtcacaagagcctttgaagtatagtggcggatccgcagctcagagcaccgtgcttcacgcctttgatgaattcctgggaattcgccattcgaaggagtctggcgactttctctaccgcatgagggattacatgcccccgagccacaaggcttttatagaggacattcactccgccccatcacttcgagattatattctctcatctggccaggatcatctgttaactgcttataatcaatgtgtgcaagccttggcggagttgagatcctaccacattacaatggtaacaaaatacctgatcacagccgcagcaaaagcaaagcatgggaaacctaaccatctgccggggccaccacaggccctcaaagaccgtgggaccggtggcaccgccgtgatgtcctttttaaagagcgtccgtgataaaactctcgaaagcatcttgcacccccgagggtag

SEQ ID NO: 363 - DNA, 537 bp, Artificial Sequence
  Description of Artificial Sequence: Synthetic Transcript Sequence
atgcacagcagcgccctgctgtgctgcctggtgctgctgaccggcgtgcgggccagcccgggtcagggtacccaatcagagaacagttgcacgcactttcccggcaatctgccaaatatgctaagggacctccgggatgcgttcagccgtgtcaagacattcttccagatgaaagaccaactcgataacctcctgctaaaagagagcctgttggaagatttcaagggatatttgggctgccaggccctgtcagagatgatccagttctacctcgaagaagtcatgccacaagcggagaatcaagatccagatataaaagctcacgtgaacagcctaggagagaacttgaaaacactgcgccttcgtctgcgccggtgtcacagattcctgccctgcgagaacaagtccaaagcggtggagcaggtgaagaacgcctttaacaaactgcaggagaaaggcatctacaaagctatgtcggagttcgatattttcatcaactacattgaagcttatatgacaatgaagatacgcaattag

SEQ ID NO: 364 - DNA, 762 bp, Artificial Sequence
  Description of Artificial Sequence: Synthetic Transcript Sequence
atgtggccccccggcagcgccagccagcccccccccagccccgccgcggctacaggccttcacccagctgccagacccgtgagccttcagtgccgcctgagtatgtgcccagccaggtcactcttgttagttgcaactttggtgctgttagaccatctgagtctggcacgcaacctgccagtggctactcccgatcccggcatgtttccctgcctgcatcacagccaaaatctgcttcgtgctgttagcaacatgctgcagaaggcacgccagaccttggaattctacccatgcacttcagaggagatcgatcacgaggacatcacaaaagataagactagtactgtcgaggcttgtctgcccttggaactcaccaagaacgagtcctgcctgaatagccgtgagactagcttcattactaatggttcctgtctggccagccgcaaaacatccttcatgatggcactttgcctctcaagtatctacgaggacctgaaaatgtatcaggttgagtttaagacgatgaacgccaaattattgatggaccccaagagacagattttcttagatcagaatatgttggcggtgatcgacgaactgatgcaagcgctgaacttcaactccgaaaccgtgccacaaaagtctagcctagaggaacccgatttctacaagactaaaatcaagttgtgcatcctgttacatgctttccgaattagagccgtgactatcgatagggtcatgtcttacctgaacgctagttag

SEQ ID NO: 365 - DNA, 720 bp, Artificial Sequence
  Description of Artificial Sequence: Synthetic Transcript Sequence
atgtggccccccggcagcgccagccagcccccccccagccccgccgcagccactggtctgcatcccgccgctcggccggtgagcctgcagtgtcggctctctatgtgtcctgcaagaagtctattgttggtcgcaaccctggtcttactggatcacctttcccttgctcgtaacctaccagtggccacccccgacccgggaatgttcccctgcctccaccactctcaaaatcttctgagggccgtctcaaacatgcttcaaaaggcgaggcagaccctggagttctacccctgcacttctgaggaaattgaccatgaggatatcacaaaagacaaaacatccactgtcgaagcttgccttccgctcgagctcaccaagaatggatcctgtctggcttcaaggaagacctcgttcatgatggctttatgcctgagttcaatatacgaggatctcaagatgtatcaagtagaatttaagacaatgaacgcaaaattactgatggatccaaaacgacagatcttcttagatcaaaacatgctggcagttattgatgaactcatgcaggctcttaatttcaattctgagaccgtgccccagaagagtagtttagaggagccagacttttataagaccaagatcaagctgtgtatcctgttacacgcattccggattcgggcagttacgatcgacagagtgatgtcctatttgaacgcctcctag

SEQ ID NO: 366 - DNA, 648 bp, Artificial Sequence
  Description of Artificial Sequence: Synthetic Transcript Sequence
atgtggccccccggcagcgccagccagcccccccccagccccgccgccgccaccggtctccacccggctgctcgacccgtctctcttcagtgcagactgtcaatgtgcccagccagaagcctgctgttggttgccaccctagtgctcttggatcaccttagtcttgcgaggaatctacccgttgccactcccgaccccggtatgttcccgtgccttcaccactcccagaatttattacgggcagtaagcaacatgctgcagaagaacgagagttgtctgaattcccgggagacctccttcattacgaacggctcttgcttggccagccgcaaaacatcatttatgatggcattatgccttagttctatttatgaagacctaaagatgtaccaggtggaatttaaaacaatgaatgctaagctgctcatggacccaaagcgccaaattttcctggaccagaatatgctcgccgtgatcgatgaattgatgcaagctctgaacttcaattcagaaactgtccctcagaagagctcactggaggaacccgacttctacaaaactaagattaagctctgcattctgcttcatgcctttcgtatccgggctgtgacaatagatagggtcatgagctacctgaacgcctcttag

SEQ ID NO: 367 - DNA, 429 bp, Artificial Sequence
  Description of Artificial Sequence: Synthetic Transcript Sequence
atgagcctgctgcccgtgccctacaccgaggccgccagcctgagcaccggcagtacggtcaccataaaaggacgccctctggcttgtttccttaacgagccttatctgcaagtagacttccacacggagatgaaagaagagtctgacatagtgtttcatttccaggtgtgttttgggcgtcgcgttgtgatgaactctcgcgagtacggagcctggaaacagcaggttgagagcaagaatatgccattccaggacgggcaggagttcgagctttccatatccgttcttcccgacaagtatcaggtcatggtaaatggacagtcatcctatacctttgatcatcgaattaaacccgaggccgtgaaaatggtgcaggtgtggcgggacatcagtctgactaaattcaatgtgtcctatctgaagcgatag

SEQ ID NO: 368 - DNA, 657 bp, Artificial Sequence
  Description of Artificial Sequence: Synthetic Transcript Sequence
atgagcttcgtgggcgagaacagcggcgtgaagatgggcagcgaggattgggaaaaggacgaacctcaatgttgtctggaggatccagcagggtcacctctggagcctggacccagcctcccaaccatgaacttcgtccacacgtcacccaaggtgaaaaacctcaatcccaagaagttttcgatccacgatcaggatcacaaggtcctggtgctcgattctggaaacctaatcgctgtccctgataagaactatattaggcccgaaatattttttgcactagccagcagtctgtcgtctgctagtgccgagaaaggatcccctattctcctcggagtgtccaagggagagttttgtctctactgtgataaggataagggtcagagtcatccgagtctacagctgaagaaagagaagctaatgaaactggcagctcaaaaagaaagcgcccggaggccatttatcttctatcgagcccaagtaggatcctggaacatgcttgagagcgcagcccaccccggctggttcatctgtaccagctgtaattgtaatgagccagtcggcgttactgataaatttgaaaatcgcaaacacattgagttttccttccagcctgtgtgtaaggccgaaatgtccccttccgaggtctcggactag

SEQ ID NO: 369 - DNA, 579 bp, Artificial Sequence
  Description of Artificial Sequence: Synthetic Transcript Sequence
atgagcggctgcgaccggcgggagaccgagaccaagggcaagaacagcttcaaaaaaaggctgcgtggccccaaggtgaaaaacctaaaccctaaaaagtttagtattcatgaccaggatcataaagtgttggtactggacagcgggaacttgatcgctgtgccggacaaaaactacattcgacccgaaatattctttgccctggctagttctcttagttctgcaagtgccgagaagggatccccgatactgctgggcgtgagtaagggcgagttctgcctgtattgcgacaaagacaagggtcaaagccatccctcactccagctgaagaaagagaaactgatgaagctggcagctcagaaagaatcggcccgtcgccccttcatattctatcgggcccaagtgggctcctggaatatgttggagagtgccgcccaccccggctggtttatttgcacctcttgtaactgcaacgaacctgtaggtgtaacggacaaattcgagaataggaagcacattgaattctccttccagccggtttgcaaagctgagatgagcccaagcgaggtgagtgattag

SEQ ID NO: 370 - DNA, 474 bp, Artificial Sequence
  Description of Artificial Sequence: Synthetic Transcript Sequence
atgagcttcgtgggcgagaacagcggcgtgaagatgggcagcgaggactgggaaaaagacgagccgcagtgttgcctcgaagaaattttctttgcgctggcatcatccttatcgtccgcatccgcggaaaagggaagcccaatccttctgggagtgtctaaaggggagttttgcctttattgcgacaaagacaaggggcagtcacatccatcactgcaactcaaaaaagagaagctgatgaaactggctgcccagaaggagtcagctagaaggccatttatattttaccgggcccaggtcggctcctggaatatgctcgaatcggccgcacaccccggttggtttatttgtacttcatgcaattgtaacgaacccgtcggcgtaactgataagttcgaaaaccgaaagcacattgaatttagctttcagcctgtttgtaaggcagagatgagccccagcgaggtctctgactag

SEQ ID NO: 371 - DNA, 594 bp, Artificial Sequence
  Description of Artificial Sequence: Synthetic Transcript Sequence
atgagcttcgtgggcgagaacagcggcgtgaagatgggcagcgaggattgggagaaggacgagccacaatgctgcctagaagggccaaaggtcaaaaacctcaatcctaaaaaattttcaatacacgaccaggaccacaaagtgctcgtgctggactcaggaaatttgattgcagtccccgataaaaattacattcggcccgagatctttttcgcattagcgagttcactgagttcagcctccgccgagaaaggaagtcccatactgcttggagttagcaaaggcgaattctgtctgtactgtgataaagacaaaggccagagtcacccttccttgcagctgaagaaagagaagttgatgaagttggccgcacagaaggaatccgcacgccggccttttatattttatagagctcaggtgggaagttggaatatgctggaatctgccgctcacccaggatggtttatttgcacaagttgtaattgtaatgagcctgtgggcgtgacagacaaatttgaaaatagaaaacacattgaattcagctttcaaccagtgtgtaaggctgagatgagcccttccgaagtcagcgactag

SEQ ID NO: 372 - DNA, 537 bp, Artificial Sequence
  Description of Artificial Sequence: Synthetic Transcript Sequence
atgagcttcgtgggcgagaacagcggcgtgaagatgggcagcgaggattgggagaaagacgaaccacagtgttgcctggaagaccctgcaggctcccctcttgaacccgggccgtcacttcctaccatgaatttcgtccacacgaagatcttttttgcacttgccagctctctcagtagcgcttcagctgaaaaggggagtccaatactcctcggagttagcaagggtgaattctgcctgtattgtgataaagataaaggacagagtcacccttccctgcagctgaagaaggagaagttaatgaaattagcagcacagaaagagagcgcgcgccgcccttttattttttaccgggcacaggtaggctcttggaacatgctggagagtgcagctcaccccggatggtttatttgtaccagttgtaactgtaacgagccagttggcgtgaccgacaaatttgagaacaggaaacacatagagttcagtttccagccggtttgtaaggcagagatgtccccgtccgaggtgtcggattag

SEQ ID NO: 373 - DNA, 1344 bp, Artificial Sequence
  Description of Artificial Sequence: Synthetic Transcript Sequence
atgatccccaccttcaccgccctgctgtgcctgggcctgagcctgggtccccggactcacatgcaggcgggcccgctcccaaagcccacactttgggccgagcccggtagcgtcatcagttggggaaactcggtgacgatctggtgtcaggggaccctggaggccagagagtatcgattggacaaggaggaatcaccggcaccctgggaccgccagaacccactggagcctaagaacaaggcacggttctcaatccccagcatgaccgaggactacgccggacgctatcgttgctactaccgaagccccgtgggctggtcccaaccatcagacccactggagctcgtgatgacaggagcctacagcaaacctacactttccgcattgccctctcccctggtgacaagcggaaaaagcgtgacgctgctttgtcagagcaggagccctatggacaccttcctgctcatcaaagagagggcagcgcaccccctgctccaccttcgttccgagcacggggcccagcagcaccaggctgagtttccgatgagccccgtgacaagcgtgcatggcggaacataccggtgttttagcagccacgggttctctcattatttactcagtcacccctcggatcccctggaactcatcgtctccgggagcctggaagatccccggcctagtccaaccagaagcgtctccaccgcggccgggcctgaggatcaaccattgatgcctactggcagcgtccctcactcaggtcttagaaggcactgggaggtccttatcggagttctggtggtgtcaatcctcctgctgagccttctcctcttcttgctcctgcagcactggaggcagggaaaacaccgtacactagctcagagacaggctgactttcagcgacctccaggcgccgccgagcctgaacctaaggatggaggcctgcaacggagatcttcacccgcagccgatgtccagggggagaacttctgtgccgccgttaagaatacccagcctgaagacggcgtggaaatggatacccgcagtccgcacgacgaggacccgcaggcagtgacttatgccaaagttaagcattcacgacccagacgcgaaatggcttctcccccatcaccgctctctggcgagttcctggataccaaagacagacaggccgaggaagacagacagatggacactgaggctgcagcctccgaagccccccaggatgtcacctacgcccagctgcatagttttacattgcgccagaaggctaccgaacccccaccttcacaggagggggcctctcctgccgaaccgtccgtgtatgctactctggcaatccattag

SEQ ID NO: 374 - DNA, 636 bp, Artificial Sequence
  Description of Artificial Sequence: Synthetic Transcript Sequence
atggtggcccacaaccaggtggccgccgacaacgccgtgagcaccgcagcagagccacgccggaggccggagccgagttcttccagttcctcatctccggccgccccagcccgccctcgcccttgtcccgctgttccagcacccgctccaggagatacccactttcgcactttccggagccatgcagattatagaagaattacccgtgcctcagctcttctcgatgcctgcggcttttactgggggccccttagcgttcacggagcacatgaacgtctgcgcgcagaaccggtgggtactttcctggtgcgggacagtaggcagaggaattgctttttcgcattgagcgtcaagatggcatcagggcccacaagcatacgtgtgcacttccaggcgggaaggttccaccttgacgggtccagggagtccttcgactgcttatttgagctacttgagcactacgtcgctgccccgcgccgcatgttgggtgctcccctccgacaacgtagagttcgaccactgcaggaactctgccgtcagcggatagttgctaccgtcggccgggagaatctagcgcggatccccctgaatcctgtcctcagagactacctctcttccttcccttttcagatctag

SEQ ID NO: 375 - DNA, 1596 bp, Artificial Sequence
  Description of Artificial Sequence: Synthetic Transcript Sequence
atggccgccaccctggacctgaagagcaaggaggagaaggacgccgaactcgataagcgcatcgaagcactccggcgcaagaacgaggctctgattagaaggtatcaggagatcgaggaggacaggaagaaagccgaactagagggggtggctgttactgcgcccaggaagggccgaagcgtggagaaggagaatgtggccgtggagtcagagaagaaccttgggccgtcccgcaggagtccaggtacgcctcgaccccctggcgcttccaaaggcgggagaacgccaccccagcagggaggacgcgccgggatgggccgcgcgtcacggagttgggagggatcaccaggcgagcaacccagaggtggcggagccggtgggagggggcggagggggcgcggccggggctcgccacatctctctggagctggagacacctctatatctgatcggaaaagcaaagagtgggaggagaggcgccgccaaaacattgagaaaatgaatgaggagatggaaaagattgccgaatatgagcgaaatcagcgggaaggcgtcctcgagcctaacccagtgcgcaatttcttagatgatccccgacgcaggtccggaccgctcgaggagtcagaacgcgataggcgtgaagagagccgccgccatggccgcaactgggggggacctgattttgaaagagtcaggtgcggccttgaacacgaacggcagggcagacgcgcaggtctcggatctgccggagacatgacactcagtatgacaggccgagaacgcagcgagtatttacgttggaaacaggaacgggagaagatagaccaggaacgcttgcagagacatagaaaacctactggccagtggcgaagggaatgggacgctgagaagaccgacggaatgtttaaggatggaccagtgccagctcacgagccatctcacaggtatgacgatcaggcctgggctcggcccccgaaacctcctacttttggagagttcttgagccagcacaaggctgaggccagctctaggaggcggcgaaaatcaagtcgtccgcaggccaaagctgcacctcgcgcatacagcgatcacgatgatagatgggagactaaggagggggctgccagccccgctccagagacgcctcaaccaacaagtccagagacgagccccaaagagacaccaatgcaaccgccggagattcctgccccagctcatcgtcctccagaagacgaaggcgaggagaacgaaggggaggaggatgaagagtgggaggacatctcggaagacgaagaggaagaagagatcgaggttgaggagggggatgaggaagaaccagctcaggatcatcaagcaccagaggccgccccaacgggtattccctgtagtgagcaggcccacggtgttccatttagccccgaagaacccttgttagagccacaagcacctggcaccccttcatcaccgttctccccgccgagcggccatcagccggtcagcgactggggcgaggaagtggagctgaactctccacgcacaacccacttagccggggccctctcccccggagaggcctggccattcgaaagcgtctag

SEQ ID NO: 376 - DNA, 531 bp, Artificial Sequence
  Description of Artificial Sequence: Synthetic Transcript Sequence
atgcggatttttgccgtgtttatatttatgacatattggcatctactgaatgccccatataacaagattaaccagcggatcttagtcgtagaccccgtgaccagtgaacacgagctcacttgccaggcggaagggtatccgaaagccgaggtcatctggacaagcagcgatcatcaggtgctgtcgggaaagaccaccaccaccaactccaagcgggaggaaaagctttttaacgtgactagtactttgcgtattaacaccaccacaaatgagattttttactgtacgttccggaggctggaccccgaagaaaaccacacagctgagctcgtcattccagaacttccactcgctcaccccccaaatgagcgcacccacctggttatccttggagcgattctgctctgccttggggtggctctgacatttatattcagacttcgaaaggggagaatgatggacgtcaaaaagtgcgggatccaggatacaaattccaaaaaacagtccgacactcatctggaagagacatag

SEQ ID NO: 377 - DNA, 873 bp, Artificial Sequence
  Description of Artificial Sequence: Synthetic Transcript Sequence
atgcggatcttcgccgtgttcatcttcatgacctattggcacttactgaacgcctttaccgttactgtgccaaaggatctttacgtcgtggaatacgggtcaaatatgactatcgaatgcaagttccccgtcgagaaacagctggacctggctgccctaatagtatattgggaaatggaagataagaatattattcagttcgtccacggagaggaagacttgaaagtccaacacagtagctacaggcagagggctagactgctcaaggatcaattatcacttggaaacgctgcgctgcagataaccgatgtgaagctccaggatgccggagtgtacaggtgcatgattagctacggaggcgcagattataaaagaatcaccgttaaggttaacgccccatacaataaaatcaatcagcgcattcttgtggtggatccagtgacaagcgaacacgagctcacctgtcaggccgagggatatccaaaggctgaggtgatctggactagcagcgatcaccaggttctgagcggtaaaacaaccaccacaaattcaaaacgcgaggaaaaactttttaacgtgactagcacattgcggattaatacgaccaccaacgagatattttattgcacatttagacggctcgatcccgaggaaaatcatactgctgagcttgtcatcccagagctgcccctcgctcacccgcctaacgaacgaacgcatctggtcatcctgggtgctattctgctctgcctcggtgtggcactcaccttcattttcagattaaggaagggtaggatgatggatgttaaaaagtgtggcatccaggacacaaacagcaagaaacaatcagacacccacttggaggaaacctag

SEQ ID NO: 378 - DNA, 612 bp, Artificial Sequence
  Description of Artificial Sequence: Synthetic Transcript Sequence
atggtgaggctgcctctgcagtgtgtgctgtggggttgtctgctgaccgccgtacaccccgagcccccaacagcctgtagagaaaagcagtacctgattaactcccagtgctgttccctgtgtcaaccaggacaaaagttggtgtctgactgtacggagttcactgaaacagaatgcctcccctgcggggagagtgaattcttggacacctggaaccgtgagacacattgccaccagcacaaatactgcgaccccaacctcggccttcgggtacagcagaagggaacatcagagacagacacaatctgcacttgtgaggagggatggcattgtaccagcgaagcgtgtgagagctgtgttctccaccgatcatgctcccctgggtttggagtgaagcagattgccactggagtttctgacactatctgcgagccatgccctgtcggcttcttttcaaacgtttcctctgcattcgaaaaatgtcacccgtggacacggtcacctggatccgctgaatcccctggaggagaccctcatcaccttcgagatcctgtgtgtcaccctctcggggcaggactctaccagaagggaggtcaggaggccaaccagtag

SEQ ID NO: 379 - DNA, 786 bp, Artificial Sequence
  Description of Artificial Sequence: Synthetic Transcript Sequence
ggaaggagtcccctccggacacgggatagagtcttgaccaactgggaggatggactgaccgtcgcttatggtgcagtgaagctgatccaatcactgtccctccagcctgttggctggcagcagaactggggcctcagcagtcccccaacaatgttgcttccttcacgcgctcagtcacctactgagttgccccttgctccgttggcagagccaaacacagggtgttcatctctgttatcctggcacagcaccagaggcgagttgcacctgtgggctctggggcttggacagatgggtggtagcaagtgtggtagtcccctgtcacctttggcccctaccctggaagcgctgcgcagaccatggtgcgggcagcaaggcgctgggggaactcggggtatttcgaccgaccccccaagcggaaaaggcggacgcgcatggggacgggaccccctacccagggaggggctactaaggggcaccgctgcccctgccgctggaggtgatctgaccccctgcctgagcagacctcctacacctagtcgcaatccgcgaagaagtatcttccccaccatcttcctggctcctacgctcctactgcagtgccgcagactctacatggacgcaaaccgctcccctcgcagaatggccaagcgggttgcatcacagtgccgcagagacagtgaggccgctcctacacaagaatgcggacacgttgggaagcaggccgtgggtcagagagcttggtgctgttgctgctgcggcgtcagagtcaggggatggcactag

SEQ ID NO: 380 - DNA, 834 bp, Artificial Sequence
  Description of Artificial Sequence: Synthetic Transcript Sequence
atggtacgattacctcttcaatgcgtcctatggggctgcctgttgacagcagtgcatcccgagccgccaactgcctgcagagagaagcaatacctgatcaattctcagtgctgctctctgtgccagccagggcagaaattggtcagtgattgcacagaattcacagagacggaatgccttccctgtggggagtccgaattcctggatacatggaatcgggagactcactgtcaccagcataagtattgcgacccaaatctgggtttacgagtccagcagaaagggacaagcgaaaccgatacaatttgcacgtgcgaggaggggtggcactgcacttccgaggcttgcgagtcatgcgttttgcaccgcagctgctcccctggctttggtgtcaaacagattgcaaccggggtttctgacacaatttgcgaaccatgcccagtaggctttttctcgaacgtctcaagcgcttttgagaaatgtcacccttggacctcttgtgaaacaaaggacctggtcgtacagcaggccggtaccaacaagacagatgtggtgtgcggccctcaggacagactccgtgccttagtggtcattcctatcatcttcggcatcttgtttgccatcctgctggtcctggtgttcataaagaaggtggcaaaaaagccgaccaataaggcccctcaccccaagcaggaaccacaggaaataaactttccagacgacctcccaggaagtaataccgcggcacccgtccaggaaactttgcacgggtgccaacccgtgacccaggaggacgggaaagaaagccgcatcagcgtccaggaacgacaatag

SEQ ID NO: 381 - DNA, 723 bp, Artificial Sequence
  Description of Artificial Sequence: Synthetic Transcript Sequence
atgatcgagacgtataaccagacatctccacgttcagcagccactggcctacctatctccatgaaaatattcatgtatctcctgacagtcttcctgataactcagatgatcggctcagccctattcgcagtgtatttacaccgtcgtctcgacaagatcgaggacgaacggaatcttcatgaggattttgtgttcatgaagacaattcagcgctgtaatactggagaaaggtccctgtccctgctgaactgcgaggagattaagagtcaattcgaaggttttgtgaaggacatcatgcttaacaaagaagagacaaagaaagaaaattccttcgagatgcaaaaggtgctccagtgggctgagaagggctactacacaatgtccaacaacttggtcacattagagaacggcaagcaattgacagtcaagagacaggggctctactacatttacgcacaggtcaccttttgcagcaaccgtgaagcctcttctcaagctcccttcattgcatccctatgcctgaaatctccgggacggtttgaacgaatcctgttgagggccgcaaatacccactctagcgccaaaccatgcggccagcaaagcatccatctgggcggtgtgtttgaactgcagcctggggcaagtgtttttgtgaatgtcacagaccctagtcaggtgagtcacgggacaggcttcacttcatttggtctgctgaagctctag

SEQ ID NO: 382 - DNA, 786 bp, Artificial Sequence
  Description of Artificial Sequence: Synthetic Transcript Sequence
atgattgagacgtacaatcagacaagcccccgaagcgcagcgaccggacttcccataagtatgaaaatctttatgtatctgctgaccgtgtttcttatcacccaaatgataggctccgctctatttgccgtgtatctccatcgcaggctagataaaatcgaagatgagcgaaacctgcatgaggactttgtgttcatgaagactattcagaggtgtaacacaggtgagcgttcgctttctctgctgaattgtgaagaaatcaagtcccagtttgagggcttcgtcaaggatataatgctgaacaaagaggagaccaagaaggagaacagcttcgaaatgcaaaagggagaccagaacccacaaatcgcagctcacgtcatatcagaggcctcatcaaaaacaacatcggttctgcaatgggctgaaaagggctattataccatgtctaacaatttggtgaccttggaaaatggtaaacagctcaccgtgaagcggcagggcctttactacatatacgctcaggtgactttttgctctaatcgggaagccagcagtcaggcaccattcattgcttcgctctgcctgaaaagcccagggagatttgaacgcattttactgcgcgctgcaaacacccactctagcgctaagccatgtggccaacagtccatacacttaggcggagtattcgaattacagcctggcgctagtgtcttcgttaatgtaacagatccatcccaagtgagtcacggcaccggcttcacctcttttggtctgttgaagctgtag

SEQ ID NO: 383 - DNA, 5169 bp, Artificial Sequence
  Description of Artificial Sequence: Synthetic Transcript Sequence
atgaggactggttgggcaacccctagacgcccagctggattactgatgctactgttctggttttttgacttagcagaaccctccggccgagccgctaacgacccattcactattgtgcacggaaacacaggtaaatgcattaagccagtgtatggctggatagtggcagacgactgtgacgagacagaagacaagttatggaagtgggtctcacagcacaggctctttcatctgcactcccagaaatgcctggggcttgacattaccaagagcgtgaacgagctgcgaatgttctcctgcgatagctctgctatgctgtggtggaagtgcgagcaccatagcctgtacggcgctgctcgatataggcttgccctgaaagatggacacggcactgctatcagtaacgccagtgacgtgtggaagaagggagggtctgaggaaagtctgtgtgatcagccctaccatgaaatctacaccagggacggcaactcctatggcagaccatgcgagttcccgttcctcattgacggtacctggcatcacgattgtattctcgatgaggaccattcgggcccatggtgcgcaactacccttaactacgagtacgaccgtaagtggggtatctgcctcaaaccagaaaatggctgtgaggataactgggagaaaaacgaacagtttggaagctgttatcagttcaacactcagaccgcactctcctggaaagaggcctatgtcagctgccagaaccagggcgcagacctgcttagtataaactcagctgcagagcttacatatctcaaggaaaaggaaggcatcgccaaaatattttggataggcctcaatcagctgtactccgctcgcggttgggagtggtcggaccacaaaccactcaatttcctgaattgggaccccgaccgtccatcggccccaaccattggcggatcgtcttgtgctcggatggatgcagaatctggtctgtggcagagctttagttgcgaggcacaactgccgtatgtgtgcagaaagcctttaaacaacaccgtggagcttacagacgtgtggacctattctgacacaagatgtgatgccggatggttgcccaataatgggttctgttacctcctcgttaacgagagtaatagttgggacaaagcacatgctaagtgcaaggccttcagcagcgaccttataagcattcattcccttgcagatgtggaggtggttgtgaccaaacttcacaacgaggatatcaaggaggaggtgtggattggattaaaaaacatcaacattcccacactcttccagtggagcgatggaactgaggtcacgttaacctactgggacgagaacgaaccgaatgtaccatacaacaagacccctaactgtgtcagctatcttggtgaattgggtcagtggaaagtccagagctgcgaagaaaaactaaagtatgtgtgcaaaagaaaaggggaaaagctcaacgatgctagtagtgataagatgtgtccgcctgatgagggttggaagaggcacggtgaaacctgctacaagatttacgaagatgaggtgccatttgggaccaactgcaaccttaccattaccagtaggtttgaacaggaatacttgaatgacttgatgaagaagtatgataaaagccttcgtaagtacttttggaccggattaagagatgtggacagttgtggagagtacaactgggccaccgtggggggtcgacggcgtgcggtcacttttagtaactggaatttcctggagcctgcaagcccgggtggatgcgtggctatgtctaccggaaagtctgttggtaagtgggaggtcaaagattgccggagcttcaaggcgctcagtatttgcaaaaagatgagtggtccattggggccagaagaggcgtcacctaaacccgacgacccatgtcccgaaggatggcaaagcttccctgcttctctgagctgttataaggtcttccacgcagaacgcatagtgaggaaaaggaactgggaggaagcggaacggttctgtcaggcactaggagcacatctttcttccttctcacacgttgacgagatcaaagagttcctccatttcctcactgaccagttctccggacagcactggctgtggatcgggctgaataagagatctcccgacctgcaggggtcctggcaatggtctgatcgcacgcctgttagtacgattatcatgcccaatgagtttcaacaggactacgatatccgggactgcgccgctgttaaggtctttcatcgcccatggcgccgtgggtggcatttttacgacgacagggagttcatctatctgcgtcctttcgcatgcgacacaaaacttgaatgggtttgccagatccccaagggcaggacgccgaagacacctgactggtacaaccctgatcgggctggaattcatggacctccccttatcatcgaagggtcagaatattggttcgtggcggatctgcatctgaattacgaggaggcagttctatactgtgctagtaatcactcttttctggctaccattacctcatttgtgggtttgaaagctatcaaaaataagatcgccaatatatcaggagacggacagaaatggtggattcgtataagtgaatggccgatcgacgatcacttcacgtatagccggtacccttggcacaggtttcccgtgacatttggcgaggagtgcctatacatgtcggcaaaaacatggctcatagatctcgggaaacccaccgattgttctaccaaacttccgtttatttgcgagaaatataacgtatcatctttagagaagtattcaccagattctgccgctaaggtacagtgctccgagcagtggatccctttccagaacaaatgctttctgaagattaagccagtcagtttgactttcagccaggcttccgatacttgccactcctatggaggcaccctgcccagcgtcctttctcagattgaacaggacttcatcactagcctgcttccagatatggaggccactctttggataggtttgagatggacagcatacgaaaagataaacaaatggactgataaccgggaactcacatactccaattttcatcccttattggtatcagggaggcttcgaatcccagaaaacttcttcgaagaagagagccgctaccactgcgccctaatactaaacctccagaagagccctttcacaggcacctggaatttcacatcttgtagcgagcgccactttgtctctctttgccagaagtattcagaggtgaagtcgcgccagacgttacagaacgcatccgaaaccgttaaatatttaaacaacctttacaagatcatcccaaaaaccctgacatggcactctgccaaaagagaatgtctgaagtctaatatgcagctggttagtatcacagatccttaccagcaggcttttctgagtgttcaggccctgctccataatagctccttgtggattggtctgttcagtcaggacgatgaactgaatttcggctggtcagatggaaagcggctgcacttttcaaggtgggcagagacaaatgggcagctggaggattgtgttgtgctggacaccgacggcttttggaagacagtggactgcaacgacaatcaacccggagccatctgttattattccggaaacgagacggagaaggaagtcaagccggtcgatagcgttaaatgtccttcgcctgtactgaacaccccttggattccgtttcagaactgctgttataatttcattattacaaaaaatcgccacatggctaccactcaagacgaagtccacaccaagtgccagaagttaaaccctaagtcgcatattctgagtattcgcgacgagaaagagaacaatttcgtcctcgaacagctgctgtattttaactacatggccagctgggtgatgctcggaatcacatatagaaacaagtccctaatgtggtttgataagactccactaagttacacacactggcgtgccggtcgacccacaatcaagaacgagaaatttctggcgggtctgtcgacagacggcttttgggacatccaaacgtttaaagtaatagaggaggccgtgtacttccaccagcattcaatcctagcctgcaagatagagatggtcgactataaggaagagtataacactactctcccgcagtttatgccttatgaggacggcatttatagtgtcatacagaagaaagttacctggtacgaggctctcaacatgtgcagccaaagcggagggcatttagcctctgtacacaatcagaatggtcagctttttctcgaagatatcgtgaagagggacgggtttccgctgtgggtaggactctcctctcacgatggctctgagtcgagttttgaatggtctgatggatccactttcgactacataccttggaagggccagacttcacccggaaattgtgtgctgctggaccccaagggcacttggaagcatgagaagtgcaacagcgtgaaggatggggctatatgttacaagccaaccaagagtaagaagttgtccaggctgacttattcaagtcggtgccccgcagctaaagaaaacggctccaggtggatccagtataagggacactgttataaaagtgaccaggcattgcattctttctcggaggcaaaaaaactgtgcagcaagcatgatcactcagcgactatagtgtcgattaaggacgaggacgaaaacaagttcgtatcacgcctcatgagagagaacaataatatcaccatgcgggtctggctcggattgagccagcatagcgttgatcagagctggtcctggctggacggcagcgaggtaactttcgtcaagtgggagaacaaatccaaatctggggtcgggaggtgttctatgctgattgcttctaacgagacgtggaaaaaggtcgagtgtgagcacggttttggtcgagtggtgtgtaaagtgcccctcggcccagactacactgctatagcaattattgtggcaactctgagcattcttgtgctgatggggggactgatctggtttctgtttcaaaggcaccgcttgcacttggccggttttagcagcgtgcgttatgcccagggagtgaacgaggacgaaatcatgctcccttcatttcacgactac

SEQ ID NO: 384 - DNA, 5453 bp, Artificial Sequence
  Description of Artificial Sequence: Synthetic Transcript Sequence
atgcgcaccggatgggccactcctcgaaggcctgccggtctgctgatgctacttttttggttcttcgacttagccgagcccagtggcagggccgctaacgatccatttactatcgtacacggaaacacaggcaaatgcatcaagccagtatacggctggatagtggccgacgattgcgatgaaaccgaggataagctgtggaaatgggtgagccagcatcgcctgtttcacctccacagtcagaagtgtctcgggctggatattacgaagagcgtaaacgagttacgcatgttttcttgtgatagtagcgccatgctgtggtggaagtgtgagcaccattctctctacggagccgctcgatatcgactcgccttaaaagacgggcacggtactgccatctctaatgcgagcgacgtgtggaaaaaagggggatccgaggaatcactgtgcgatcagccctaccatgaaatttacacgagggacggcaactcttatggcaggccatgtgagttcccctttttgatagacggcacctggcaccatgactgcatacttgacgaagaccattcaggtccatggtgcgctacaacactgaactatgagtatgatcgcaagtggggcatatgccttaagccggagaacggctgtgaagacaactgggagaagaacgagcaatttggtagctgctaccagtttaacacacaaaccgcactgagctggaaggaggcatatgtgtcatgccagaatcagggcgctgatctgctaagtattaactctgcagccgagctcacttatctgaaggagaaagaggggatcgccaagattttctggataggcctgaatcagctgtattctgccagaggatgggaatggagtgaccataaacccttgaattttctgaattgggatccagacaggccatccgcgcctacaatcggaggcagcagctgtgccaggatggacgcagagtcggggctgtggcagagcttcagctgtgaagctcaattgccgtatgtctgtcggaaacctctaaacaataccgtcgaactaacagatgtgtggacttactctgacacccgatgtgatgccggatggctgcctaacaatggcttctgttatctgctagtgaatgaatcaaattcatgggacaaagcccatgccaaatgtaaggctttctcgtcagatctcataagcatccattcgcttgcagacgttgaagtggtggtgacgaagctacataacgaagatatcaaagaggaagtatggatcgggctcaaaaacatcaatattcctacgctgtttcagtggtctgatggtaccgaagttactttaacatattgggacgagaacgagccaaacgtcccttacaataaaacccctaactgcgttagctaccttggggagctcggccagtggaaggttcagtcttgcgaagagaagctgaagtatgtgtgcaaaagaaagggggagaagctcaacgatgcatcctccgacaaaatgtgtccacctgacgagggctggaagagacacggcgaaacctgttataaaatctacgaagacgaggtccccttcggcacgaactgtaacctgaccatcacgtctaggttcgagcaggaatatctaaatgatttgatgaaaaagtatgacaaaagcttgaggaagtatttttggactggccttcgtgatgttgatagctgcggggaatataattgggcaaccgtgggaggacgtaggagagcagtgacattttcaaattggaacttcctggagccggctagccctggaggctgcgtagccatgagtacaggaaaaagcgtggggaagtgggaagttaaagattgtagatcctttaaagccctttccatctgcaagaaaatgtctggcccactaggccctgaggaggctagcccgaagccagacgacccttgccccgagggatggcaaagtttcccggcttctctcagctgttacaaagtgtttcacgccgagcgaatcgttagaaaaagaaattgggaggaggctgagcgtttttgtcaagcgttgggcgcacatctgtcttccttttctcatgttgacgaaattaaggagtttcttcatttcttgactgaccagttcagcggccagcactggctgtggattggcctgaataaaaggtctccggaccttcagggtagttggcagtggagcgataggacacctgtgtcaaccattatcatgccgaacgaatttcagcaggattacgatatcagggattgtgccgcagtgaaggttttccaccggccatggagacgagggtggcacttctatgacgatcgggagtttatctatctacggccattcgcatgtgacacgaagctggagtgggtgtgccagatccccaaggggagaaccccgaagactcccgattggtacaatccagatagggctgggatccatgggcctcctctgatcatagaaggctctgaatactggtttgtggctgacctacacctaaactacgaggaggcggtcttatattgtgcctcaaatcattcttttctggcaaccatcacctcttttgttggattaaaggcaattaaaaacaagattgccaatattagtggggatggtcaaaaatggtggatccgcattagtgaatggccgatcgatgaccactttacctactctcggtacccttggcacaggttcccagtaacctttggtgaggaatgcctctacatgtccgctaagacgtggcttatagaccttgggaagccaactgattgttcaactaagctcccctttatctgcgagaaatacaatgtttcgagcctggaaaagtattcgccagattccgcggcaaaggtacagtgcagcgaacaatggatccctttccaaaataagtgcttccttaaaataaagcccgtttccctgacctttagccaggcatctgatacctgtcattcctatggtggaacgctgccctctgtgctcagtcaaatcgagcaggactttattactagcctgctgcccgatatggaggcaactctatggatcggcctcagatggacggcctacgaaaaaatcaacaagtggacagacaatcgtgaactgacctactccaactttcatccgctgcttgtgtccggcagactgagaatacctgaaaatttctttgaggaggaatctagataccactgcgccctgatcctgaacctgcagaagagcccatttaccgggacttggaacttcacaagctgctcagaacgccactttgtttccctgtgtcaaaaatacagtgaggtgaaatctcgccagacattacagaacgcgagtgaaacggttaagtatctgaacaatctctacaaaatcattcccaaaacactgacatggcattccgctaagagagaatgcttgaagtctaacatgcagttggtgtcgattacggacccttaccagcaggcctttctgtcagtgcaggccctcttacacaatagtagcctgtggataggtcttttcagccaggacgacgagctgaatttcggttggtctgacggtaaacgtctgcacttcagcagatgggccgagacgaacggccaacttgaggattgtgtagtactcgatacagacggattttggaaaaccgtagactgtaatgataatcagcccggagctatctgttactacagcggtaatgaaacggagaaggaggtgaaaccagtggactccgtgaaatgtcccagccccgtgctgaacactccctggataccattccagaattgctgctacaactttattattacaaagaaccgccatatggccactacccaggacgaagttcacactaagtgccagaaactgaacccaaaaagtcatattctatctatacgtgacgaaaaggaaaataacttcgttctcgaacaactcctgtactttaattacatggcatcatgggtgatgctgggaatcacctatcgcaataagtctctgatgtggttcgacaagacgccccttagttacacccactggcgtgcgggaaggcccacaatcaagaacgagaagtttttagccggactgtccactgacggtttttgggacattcagaccttcaaggtgattgaagaagccgtttactttcaccaacattccattctggcctgtaagatcgagatggtggactataaagaggagtataacacaaccctaccacagttcatgccatatgaagacggtatatactctgtaatccagaagaaggttacctggtacgaggctctgaatatgtgctcacagtcaggagggcacttagcgtccgtgcacaatcagaacgggcagctcttcctggaagatatcgtgaagcgggacggatttcccctgtgggttgggctgtccagccacgacggatcggagagttcttttgaatggtcagatggatcaaccttcgactatattccctggaagggacagacctcccctggaaactgtgtgctcctcgaccccaagggcacctggaagcatgagaagtgtaactccgtcaaggatggagctatttgctacaagcctaccaagtccaaaaaactgtcacgcctgacatattcctcgagatgtccagcagctaaagaaaatgggtctaggtggattcaatacaaagggcactgttataaatctgatcaggcgctgcactcattttccgaagccaagaagttgtgcagtaagcacgaccactcagcaactatcgtgtctattaaggacgaagatgaaaataaatttgtctcaagattgatgcgagagaacaataatattaccatgcgcgtgtggctcggccttagtcaacactcggtagattgcccgtcctctacatggatacaattccaggacagctgctacatcttcctccaggaagctataaaggttgagagcatcgaggatgtcaggaaccaatgcacagaccatggagctgatatgatctccattcataatgaggaggaaaacgcttttatactcgacactttgaagaaacagtggaaaggcccagatgacattctgctaggcatgttttacgacacagacgacgcatcatttaagtggttcgataattctaacatgacctttgacaagtggacagatcaggacgacgacgaggacttggtggatacctgtgcatttcttcatatcaaaacaggcgaatggaaaaaaggaaattgtgaagtctctagtgtggaagggacactatgtaagactgccattccatataaacgtaaatatctttctgataaccacatcctgatttccgctctcgtgattgccagtacagtgatcctgactgtgctaggagccataatttggttcctgtacaagaagcactcggactcccggtttacaacagtcttttctacagcacctcaatccccatataacgaagattgcgttctcgtggtgggcgaggaaaacgaatatcccgtgcagtttgacta

SEQ ID NO: 385 - DNA, 5621 bp, Artificial Sequence
  Description of Artificial Sequence: Synthetic Transcript Sequence
atgcgcaccggatgggctacaccaagaagaccagccggtttactgatgctgctcttctggttctttgatttggccgaaccctctggcagagccgctaacgatcccttcacaatcgtgcatggcaatacaggcaaatgtatcaaacctgtttatggttggatcgttgcagacgattgtgacgagacagaagacaaattatggaagtgggtgagccagcaccgactattccatctacactcccagaaatgcctgggacttgatataacaaagtcagtcaatgaactgcggatgttttcctgcgatagctcggctatgctgtggtggaaatgtgagcaccacagcctgtatggtgcggctcgttatagactcgccctgaaggacggccatgggactgctatatccaatgcttccgatgtatggaaaaaaggcggtagcgaggagtcactgtgtgaccagccctaccacgaaatttacactagagacggcaactcttacggcaggccatgcgagtttccattcctgattgacgggacttggcaccatgactgtattctagacgaggatcatagtggcccatggtgtgcgacaactcttaattacgagtacgaccggaaatggggtatatgtctcaaacctgaaaatggttgtgaagataattgggagaaaaacgagcagttcgggagttgctaccaattcaacactcagacagcacttagttggaaggaagcctatgtgtcttgtcagaatcagggggctgacttgcttagcattaactccgccgctgagcttacatacctgaaggagaaggagggaattgccaagattttctggattggcctgaatcagctgtatagcgctcgcggttgggagtggagcgatcacaagcccctgaacttccttaattgggatccagaccgtccttctgctcctacgattggagggtcctcttgcgctcgaatggatgccgaaagcgggctctggcagtcctttagctgtgaagcccagctaccgtacgtctgcaggaagcccctgaataatacagtagagttgaccgacgtctggacatatagcgatacccggtgcgatgctggctggctgcctaataacgggttctgctatcttctggtaaacgagtcaaatagctgggacaaagcccacgcgaagtgtaaggctttttcctcagatctgatcagcattcacagtctggcagacgttgaggtggtcgttacaaaactgcacaacgaagacatcaaagaagaggtgtggattggtttgaagaatatcaatatccctacgcttttccagtggagcgacgggacagaagtgactttgacttactgggatgagaatgaacctaacgtgccttacaataagacacctaattgcgtgagctatctcggagagctggggcaatggaaggtgcagtcctgcgaggagaagcttaaatacgtgtgcaaacgtaaaggcgagaaattaaacgatgccagttcagacaagatgtgcccacctgacgaaggctggaaacgtcatggcgagacatgttacaaaatctacgaggacgaggtaccattcggaacgaactgtaatctcacgattacatcccgctttgagcaggaatacctgaatgatctgatgaagaagtatgacaagtctcttcgcaaatacttctggactgggctcagagacgttgacagctgtggcgaatataattgggccactgtgggcggaagacgacgagccgttacattcagcaattggaactttctggagccggcatcccccggagggtgtgtcgctatgtcgactggtaagtcagtgggcaagtgggaggtaaaggattgccgatcgtttaaggccctgtcaatttgcaaaaaaatgtccggcccactggggccagaggaagcaagccctaagcctgacgacccatgtccagaaggatggcaatcgttcccggcatctctctcatgctacaaggtgttccacgccgagagaatcgttcgaaagaggaactgggaggaggctgaaagattctgccaggctttgggtgcgcacttgtcctcattttcgcatgtggatgaaattaaagaattcctccacttcctgactgaccagtttagtgggcagcactggttgtggattgggttgaataagcggtcccctgatttacagggctcctggcagtggagcgataggacgcccgtgagcaccattattatgcccaatgagttccagcaagattatgacatacgcgattgcgctgccgtcaaggtctttcatcgaccttggcgacggggatggcacttctacgatgaccgggaattcatctatctgcgacctttcgcctgtgacaccaagcttgaatgggtctgccagatcccaaaaggcagaacccctaagactcctgactggtataatcccgaccgggcaggcattcacggccctccgctaatcattgagggaagcgagtattggtttgtcgccgatctgcatctgaactatgaagaggcagtcttgtattgcgccagtaatcattcttttctggcaacaattacgagctttgttggattgaaggcgataaaaaacaagatcgctaatatatctggggacggccagaaatggtggataagaatttctgaatggccaattgacgatcacttcacctattcaaggtacccatggcatcggttcccagtgacttttggagaggagtgtctgtatatgtcagcaaagacgtggttaatcgacctgggtaaaccaacagactgcagtacaaaactgccctttatttgcgagaaatacaatgtctcgagcctggaaaagtacagtccagacagcgccgctaaagtccagtgctccgaacagtggatcccatttcagaacaaatgctttctgaagatcaaacctgtcagtctgacatttagccaggcttcagacacatgccactcctacggtggaactctgcccagtgtcctcagtcagatcgaacaagatttcatcacgtccttactccctgacatggaggctacactctggatcggactcagatggacagcttacgagaagatcaacaagtggaccgacaatcgagaactcacctactctaactttcatcctctcctcgtctcaggtcgactcagaatacctgagaatttttttgaggaagagagtaggtatcactgcgccctgatacttaacttacaaaaaagccctttcacagggacgtggaacttcactagttgcagtgaacggcattttgtgagcctgtgccagaagtacagcgaggtcaaatcacgtcagacattgcagaacgcatccgaaaccgtgaagtatctaaacaatctttataagattatccctaagactctgacctggcactccgcaaagcgagaatgtttgaaatccaacatgcaactcgtttctatcacagatccttatcaacaggcttttctttcagtgcaggccctgctccacaactccagcctgtggatcggcttattttcccaggacgacgaactgaatttcggctggtctgacgggaagcgtcttcatttctctagatgggccgagacaaatggtcagctggaggactgcgtggtgctcgatacagatggattttggaagaccgtcgactgtaatgataaccagcctggagctatttgctactatagcggaaatgaaacagaaaaagaagtgaaaccggtcgattcagtaaagtgtccctccccagtccttaacacaccatggatacccttccaaaactgctgttataactttatcatcacgaagaatcgacatatggccacaactcaggacgaggtccatacaaagtgtcagaagttgaaccccaagtctcacatcctctccatacgtgacgagaaagaaaacaatttcgtgctcgaacagctattatactttaactatatggcgagttgggtgatgctgggaataacataccggaataagagtctgatgtggtttgataagactccactgtcctacacccactggcgagcaggacggccaactataaaaaatgagaaattcctggctggacttagtacggacgggttttgggatatccagacgtttaaggtgatcgaagaggcggtgtacttccatcagcactccatcctcgcctgtaaaatcgaaatggtagactacaaagaagagtacaacacaacccttccccagtttatgccctatgaggacggcatatactcagtgatacagaaaaaagtcacgtggtacgaagccctgaacatgtgtagccaaagcgggggacatttggcttccgtgcacaatcaaaacgggcaattgtttcttgaagacattgtcaaaagggacggattccctctgtgggtggggctctcctctcacgacggttccgaaagtagtttcgaatggtctgatggctcaactttcgattatatcccttggaaaggccagacttctcctggtaactgcgttctgttggaccccaaagggacctggaaacatgaaaagtgtaattctgtcaaagacggggcaatctgttacaagcccactaagtctaaaaagctctccaggctcacctacagtagccggtgcccagcagctaaagaaaatgggtcgaggtggatccagtacaaggggcattgttacaagagtgatcaggcgctgcatagtttttctgaggccaaaaagttgtgttccaaacatgaccatagcgctacaattgtgagcatcaaggacgaggacgagaacaaatttgtgagtcgcttaatgcgggagaacaacaacatcactatgagagtgtggttgggactgtcccagcattccgtggaccaaagttggagttggcttgatggctccgaggtaaccttcgttaagtgggagaacaagagtaaaagtggcgtcgggaggtgctcaatgctgatcgccagtaatgagacatggaaaaaagtggaatgtgagcacgggttcggccgtgttgtttgtaaggtgcctctagactgccccagcagtacctggatccagtttcaggacagttgttatattttccttcaggaggctatcaaggtcgagtctatcgaagatgtcaggaatcagtgcacagatcacggggcagatatgatctccatccataacgaggaagagaacgctttcatcttggacaccctaaagaagcaatggaagggtccagatgacatactgctaggcatgttttatgacaccgatgatgcttcattcaaatggtttgataatagtaacatgacatttgataagtggacagatcaagacgatgacgaggatctggtggacacctgtgcattcctccatattaaaacaggagaatggaaaaaggggaactgcgaggtgtctagcgtagagggcactctgtgcaagactgcgatcccttacaagcggaaatatctctcagacaatcacatccttatttccgccttagtgatcgccagcactgtgattctcacagtactgggtgcaatcatatggttcctttataagaagcattctgactcacggttcaccaccgtgttctcaacagctcctcagtccccttacaatgaggactgtgtgctagtggttggagaggagaacgagtaccctgttcagttcgatta

SEQ ID NO: 386 - DNA, 186 bp, Artificial Sequence
  Description of Artificial Sequence: Synthetic Transcript Sequence
atgaaaaggttcctttttctgctcctgacaatttctcttctggtgatggtccaaatccagaccggcttatcagggcagaatgacacctcccagacctcctcaccctctgcttcaagcaatatcagcggtggtatcttcctctttttcgtggctaacgccatcatccacttattttgtttctcttag

SEQ ID NO: 387 - DNA, 1062 bp, Artificial Sequence
  Description of Artificial Sequence: Synthetic Transcript Sequence
atggagttgaccgaactgctgttagtcgtgatgctgctgttgacagctcggctgacattgagctctccagcaccccctgcttgcgaccttcgcgtgctgtctaaactgctacgggatagtcatgttttgcactctcgcctgagccaatgtcctgaggtccatcccctgccaaccccagtcctgctccccgctgtcgatttttccctgggtgagtggaaaacccagatggaggagactaaggcgcaggatatcctcggtgccgtaacccttctacttgaaggggttatggccgcaaggggacagctcggcccaacttgtctgtcttctctgttaggacaattgagtggacaggtgagactgctactgggcgctctgcagtcattgcttgggacccagttgccgccacagggccgaaccaccgcccataaggaccctaacgccatttttctgtcttttcagcacctactcagaggcaaggtcaggtttttgatgctggtcgggggtagcaccctgtgcgtgcgcagagcacctccgactacagcggtgccctcccggacttccctggtgctcacactgaacgaactaccaaatagaacctcgggcctccttgaaacaaacttcacggccagcgcacgaaccactggctccggattattgaagtggcaacagggattcagagcaaaaatacctgggctgctgaaccagacgagtaggtccctggaccagatacctgggtatctgaaccgcatccacgagctattgaatggcacacggggtctctttcccggacctagccgcaggacgttgggagcccctgatatatcctctggcacatcagatacaggctccttgccacctaacctacagccgggttattccccgtcacccactcaccctcctaccggccagtacaccttgttccccttaccacccactctcccaacaccagtggtccaattacaccctctcctcccagacccatcagcccctacccccacaccgacttctcctctgctcaacacctcttacacccattctcaaaacctctctcaggagggctag

SEQ ID NO: 388 - DNA, 537 bp, Artificial Sequence
  Description of Artificial Sequence: Synthetic Transcript Sequence
atgaccgtgcttgctcccgcatggtctccaaccacttatctgctgctgcttctgcttctttcgagcggcctcagcggtacacaggattgctcttttcagcacagccctatatcaagcgacttcgcagtgaaaattcgggagttaagtgactaccttctgcaggactaccccgtcaccgttgcctcgaacctccaagatgaggaattgtgcggaggactctggcgtctggttctggcacagcgctggatggagaggctaaagaccgtcgccggttccaaaatgcaagggctgttagaaagggtgaacactgagatccacttcgtgactaagtgtgctttccaacccccaccttcttgtctcaggttcgtccaaacaaatatttcccgtctcctgcaggaaacctctgaacaattagtggcccttaaaccatggattactcgtcaaaacttctccagatgcctggagttgcaatgccaacctgttgaaacggtcttccatcgcgtaagccaggacgggctggatctgttgacttcctag

SEQ ID NO: 389 - DNA, 708 bp, Artificial Sequence
  Description of Artificial Sequence: Synthetic Transcript Sequence
atgactgtccttgcacccgcttggtcaccgaccacttatctgctgcttctgctactgctgtcctctgggttatctggcacacaggactgttcttttcagcactccccaatcagcagtgactttgcagtaaaaatccgggaactttctgattaccttctccaagactatcctgttacagtcgcgagcaatttacaggatgaagagctgtgcgggggtctgtggcggctcgttctggctcagaggtggatggagcggcttaaaacagtggctggcagcaagatgcagggcctcctggaacgggtgaacacagagatccattttgttaccaagtgtgcctttcagcctccccctagttgcctcaggttcgtgcaaactaacattagtcgcctgctgcaggagacgagtgaacagctcgtggctctgaaaccgtggatcaccagacagaatttcagccgctgcctcgagttacagtgccagcccgactctagtactctgcctccaccgtggtcacccaggcccctggaggcaacggcccctactgctcctcaaccacctctactgctgctactcctcctgcctgtcgggctgttgttactggccgctgcttggtgcttacattggcagaggacccgcagacgcacccctcgccctggggaacaggtgccgccagtccccagcccccaggacctgctgctggttgagcattag

SEQ ID NO: 390 - DNA, 1110 bp, Artificial Sequence
  Description of Artificial Sequence: Synthetic Transcript Sequence
atggtttgggcaccactcggacctccacggacagactgcttgaccctgctccatactccaagcaaggattcccccaaaatgagcttggaatggctcgtcgcttggtcctggtctctcgacggactccgcgactgcatcgctacagggatccagtcagtcagagactgcgataccacagcagttatcacagtcgcctgccttctggtcctctttgtgtggtattgttaccacgtgggcagggaacagccgagaccttacgtctctgtgaacagtctcatgcaggctgctgacgcaaacggcctacagaatggctacgtctactgtcagtcgcccgagtgcgtgcgatgtactcacaatgagggactgaaccaaaagttgtaccacaacttgcaagagtacgccaagaggtactcctggtccggcatgggcaggatccacaagggcattcgggaacaggggagatacctgaattctcgcccatccatccagaaacccgaggttttctttctgcctgacctgcctaccacaccatatttttcccgggacgcccagaaacacgatgtcgaggtactggagcgcaactttcagaccatcctgtgcgagttcgagaccctctacaaagcattctccaattgtagtctccctcaggggtggaaaatgaattctacaccctcgggcgagtggtttacattttatttagttaaccagggggtctgcgttccacggaactgtagaaaatgtccacgcacgtaccgactgcttggctcgctgcgcacttgtatcgggaataatgtgtttgggaatgcatgcatcagtgtccttagcccgggtacagtgatcacagagcattacggaccgacaaacatccggatccggtgtcacctggggctgaaaacaccaaacggctgcgaactagtagttggaggagaaccacaatgttgggccgaaggccgatgcctgttatttgacgattcgtttctgcacgccgcatttcacgagggctccgctgaggatgggcctcgggtggtgtttatggtggatctctggcaccccaacgtggctgctgcagaacgacaagctctcgattttatctttgcccctggtagatag

SEQ ID NO: 391 - DNA, 1989 bp, Artificial Sequence
  Description of Artificial Sequence: Synthetic Transcript Sequence
atgcgcccacaaatcttgctgttactcgccttgctaactctgggactggcagctcaacaccaggacaaagtgccctgcaaaatggtggacaaaaaggtgtcgtgccaagtgttaggcttgctacaggtgccgagcgtcttgccaccagacactgagacgctagatctcagtggcaaccagctccgctcaatactcgcttcgccactgggattctacacagctcttagacacctggacctgagcaccaatgaaatttcattcctccaaccaggggcattccaggccctcactcatctcgagcacctgagcctggctcacaacaggctggctatggcaactgccttgtccgccggaggcctaggccctctgccccgtgtaacctccctcgacctctccgggaacagcctgtacagtgggctcctcgagaggctcctgggggaagccccttccctacacactttgagtcttgccgaaaactcgctgacccgcctgacacgccacacctttagagatatgccggctctggagcagttggacctgcactctaacgtgctcatggatattgaagacggggcttttgaaggattgccgaggctgacccatctgaacttgtctcgaaatagcctcacctgtatctccgactttagtctccagcagctgcgagtgttggacctgtcttgcaacagtatcgaggcttttcaaaccgcctcccagccacaggctgagtttcaactcacctggctggacttaagagaaaataagttacttcactttcctgatctggcggctctgcctaggttgatctatctgaacttgtccaacaatctgatacgattgccaacaggacctcctcaggactctaagggtattcacgcaccatccgaaggctggtcagctctgcctctcagtgcaccaagtggcaacgccagcggtcgccctctatctcagcttcttaatttagacctgagctataacgaaatagagctgattcctgactcatttctcgagcacttaacatccctgtgctttttgaacctgtcccggaattgcctgagaacctttgaggccagaagactggggtcactaccctgtttaatgctgctggatctgtcccacaacgccctggaaactcttgagctgggtgcaagggctctgggttctctacggacgttgctcctgcagggaaacgcccttagagacttgccaccctacaccttcgcgaacctggccagtctgcagcgcctgaacctgcagggcaatagggttagcccctgtggaggccctgacgagcccggacctagcggatgcgtggctttctcaggaattacttctctgcggtccctttccctggttgacaacgaaattgagcttttaagggccggagcctttctgcacaccccattgactgagcttgatctgagttctaatcccggacttgaagttgctacgggcgctctgggcggactcgaagcgagtctggaagtcctggcactccagggaaatggcctaatggtactgcaggttgatttaccgtgtttcatctgcctcaagcgcctcaaccttgccgagaaccgcctctctcacctccccgcatggacacaggctgtttcattggaggtccttgatctgagaaacaactcctttagccttctaccgggtagcgccatgggcggacttgaaaccagcttgaggaggctctacctgcaggggaaccctctctcgtgctgtggcaatggttggctggcagcgcagctgcaccaaggtagagtcgatgtggacgccacccaagaccttatttgccggtttagttcccaagaagaggtcagtctgtcacacgtgagaccagaggattgtgaaaagggtggccttaaaaatatcaatcttatcatcatacttaccttcatattagtctcagcaatactgctaacgacactggcagcctgttgctgcgtcagacgtcagaagttcaatcagcaatataaggcttag

SEQ ID NO: 392 - DNA, 1989 bp, Artificial Sequence
  Description of Artificial Sequence: Synthetic Transcript Sequence
atgcgcccacagattctgctgttactggccctccttaccctgggcctggccgctcagcaccaagataaagtgccatgtaagatggttgacaaaaaggtgagttgccaagtgctcggactgcttcaggtaccctccgtgctgcctcctgatactgagaccctcgatctgtccggcaatcagctgaggtcaatcctagcctcacctctgggcttctacactgccctgaggcaccttgatttgtcaacaaacgagatctctttcctccaaccgggtgcctttcaggccctgacacacctcgaacacctgtcattggcccataatagactcgccatggctaccgccctgagcgctggaggacttgggccactcccccgtgtaacatctctcgacttatccgggaacagtctgtacagtggcttactggaaaggctcctgggtgaagccccatccctgcacaccctctctttggctgagaattcgctcacacggctcactagacacactttccgggatatgcccgcactggagcaactagatctccattcgaatgtactgatggacatagaagacggagccttcgaggggcttcccagactcacacatctgaacctcagccggaatagcctgacctgtattagtgatttttctttgcaacaacttagagttttggatctgagttgtaactctatcgaggctttccagacagcaagccagccccaggctgagttccaactcacctggctagatctacgggagaataaactactgcattttcccgacctggctgcactcccgagattaatttacttgaatctgtcaaacaatctcatcagattgcccacgggaccaccacaggacagtaaggggatccacgcaccttctgaaggctggtctgctctccccctgagtgcgccaagcggaaacgcctctgggaggcctctgtcccaactgctgaatctggatcttagctataacgaaatcgaacttatccctgatagcttcttggagcacctaacctccttgtgttttctaaatctctcccggaactgcctaaggacatttgaggctcgacggctgggatcactaccgtgtttaatgctcctggatctgtcccacaatgcccttgaaactttagagctcggcgctcgcgcattggggagcctaagaaccctcctcctccagggaaatgcccttcgcgatctcccaccatatactttcgccaatttggccagcctacagaggctgaacctgcagggcaaccgggtgagcccctgcgggggtcctgacgaaccaggaccaagtgggtgtgtggcctttagtggaatcactagtctcaggtctctgtcactggttgataatgagatagagttactgagagcaggcgctttcctgcacactccactgacagaactggatttgtcctccaatccgggactggaggtcgcaacaggagctcttggagggcttgaggcttcactggaagttctggcccttcagggaaatggcttaatggtgttgcaagtggacttaccgtgcttcatctgtctgaagagactgaacctggccgagaatagactgagccacctccctgcgtggactcaagctgttagcctcgaggtgctagacttgaggaataactctttctctctgttgcccggatccgcaatgggaggtctggaaacgtctttaagaagactctatctccagggcaacccactttcctgctgtggcaatgggtggctggccgctcagctacaccagggcagggttgacgtcgacgccactcaagatttgatctgtcgcttctcgagtcaagaggaagtctcccttagtcacgtccggcctgaagattgtgagaagggtggcctgaaaaacatcaatctgatcattatcctgacgttcatattagtgtctgctatccttttgaccacattggctgcttgttgttgcgtgagaaggcaaaagttcaatcagcaatacaaagcctag

SEQ ID NO: 393 - DNA, 1989 bp, Artificial Sequence
  Description of Artificial Sequence: Synthetic Transcript Sequence
atgcgccctcaaattctccttctcttggctctgctaactctcggcctagctgctcagcaccaggataaggtaccttgtaagatggtggataagaaagtgagctgtcaagtgctggggctgctgcaggtcccttccgtgctccctcccgacaccgagacgctggatctatcagggaatcagctgagatcaatcctagcatccccactgggattctacacggcactccggcacctggatctcagtacaaacgaaatctccttccttcagccaggggcttttcaagcactcacacacctggaacatctgagcctggcacataaccggctggctatggctacggctctttcagctggcggactcggcccactaccgcgagttacttctttagacttgtctggaaactccctatactctgggctgctcgaaagactcctcggagaagccccatctcttcacacactgtctcttgcagagaacagcctcacgcgtttgactaggcacacttttcgtgacatgccagcgctggaacagctggacttgcatagcaatgtactcatggatatcgaagatggggcattcgaggggctacctcggcttacccatctgaatctgagcaggaattctcttacctgtattagtgatttttctctgcagcagcttagggtgctcgatttatcctgtaactcaatcgaggccttccagactgctagtcagccacaggcagaatttcagttgacatggctcgaccttcgtgagaacaaacttctacattttcctgacctggccgcactgccaagattaatttatctcaatcttagcaataatctcatcaggctcccaactggaccccctcaagatagcaagggaatccacgcacccagtgaaggttggagcgctctgcccctcagcgccccatctggtaatgcctcaggacggcctctgagccaattgctcaatctggatctctcatacaatgagattgagctgatccccgattcttttctggaacatcttactagcctgtgttttctcaatttgtctaggaattgccttaggactttcgaggccagaagactcggttcacttccctgcctcatgctgttagacctttcacacaatgctctggagactctagaactgggggcacgggctctgggctcacttagaactctgttgctccagggtaacgccttgcgcgatctccccccatacaccttcgccaaccttgcctccctgcaaaggctgaatttgcaaggaaatagagtgtctccttgcgggggaccggacgaaccgggtcccagtggatgcgtggcatttagcgggattacgtcgctacgcagtctatctctggtggataacgagattgagctacttagggctggagcgttcctccacaccccattgactgagctggatttgagttcgaaccccggtctcgaggtggccaccggcgctctgggcggactagaagcatccctggaagtgctcgctcttcaaggaaatggactgatggttttgcaggtggacctgccttgttttatctgcctgaagcgactgaatttagccgagaacaggctgtctcacctgccagcttggacacaggcagtgagcctcgaggtcttagatctcaggaataactccttttccctgctgccagggtccgcaatggggggtttagaaactagcttacgcaggctgtatcttcaagggaatccacttagctgttgcggtaacggatggttagcagcccagctgcaccagggccgagttgacgttgatgctacacaggatttaatatgtcggttctcttctcaggaggaagtcagcttgagtcacgtccgccctgaagactgtgagaaagggggattgaagaatatcaacctaatcatcatccttactttcatcctagtgtctgccatactccttacgaccctggctgcgtgctgttgcgtgagaagacaaaaatttaatcagcagtataaggcctag

SEQ ID NO: 394 - DNA, 561 bp, Artificial Sequence
  Description of Artificial Sequence: Synthetic Transcript Sequence
atgcgcccacagattctactgttattggcattactgacattgggcctggctgcacagcaccaggacaaggtcccgtgcaagatggtcgataagaaagtgagttgccaggtactgggcttgcttcaagttccctcagtcctaccccctgacacggagactttagacctttccgggaaccagctccgcagtatccttgccagccctcttggcttctacaccgctcttaggcacctggacttgtctactaacgaaatcagctttttgcagcctggggctttccaggcgttgacccatctagaacatctgagtctagcccataacagactcgccatggctacagctctaagcgccggagggctggggcctctccctcgggtgacgtcgttggatctgagcggcaacagcctctactcagggctgctggagcgcttgttgggtgaagcaccatccctgcatacactttccctcgccgagaattccttgacaaggcttacgaggcatacatttagagatatgcccgctctagaacagctcgatctccatagcaacgttcttatgtag

SEQ ID NO: 395 - DNA, 1212 bp, Artificial Sequence
  Description of Artificial Sequence: Synthetic Transcript Sequence
atggctcacgccatggaaaacagctggacaatcagtaaggaataccacattgacgaggaagttggattcgccctcccgaacccacaagaaaatctgcctgacttctataacgactggatgttcatcgccaagcatcttcccgatttaatcgagagtggacaattgcgcgaacgcgtggaaaaactgaacatgctgtcgatagaccacttgactgaccacaagtcccagcgcttggcccgattggtgttgggttgcatcaccatggcgtatgtgtggggaaaaggacacggggacgtcaggaaggtcctccctagaaacattgccgttccctactgccaactgagcaaaaaattggagcttccacccatccttgtgtacgcagactgcgtgcttgctaactggaagaagaaggaccccaataaacccttgacctacgagaacatggatgtcttgttcagcttcagagatggtgactgtagcaagggcttttttcttgtgtccctacttgtagagatagctgcagcgtcagcaatcaaagttatccccacagtatttaaagccatgcaaatgcaagagcgggacaccctcctgaaggcactcttggaaattgccagctgcttggaaaaagctctgcaagtcttccaccaaattcatgaccatgttaacccaaaggccttctttagtgtgcttcggatctatttgagtggctggaagggaaatccccagttgtccgatggcctagtctacgaaggcttttgggaagatcctaaggagtttgccggagggtcagccggacagtccagcgtcttccagtgctttgacgtactgctgggcatccagcagaccgctgggggaggacacgctgctcagtttctccaggacatgaggaggtatatgccccctgcccacagaaatttcctgtgttctctggaatccaatccctcagtacgggagttcgtcctctccaaaggtgacgccggtctcagagaggcatacgacgcgtgtgtgaaagctcttgtctcactccgcagctaccacctgcagatagttaccaagtatatactgatacccgctagtcagcaaccgaaggaaaataagacatccgaagacccatccaagctggaggctaagggcactggaggcactgacctcatgaactttctgaaaacagtcagatctactactgaaaaatccctgctgaaagaaggttag

SEQ ID NO: 396 - DNA, 237 bp, Artificial Sequence
  Description of Artificial Sequence: Synthetic Transcript Sequence
atggcgcacgcgatggaaaactcttggactatttcgaaggaataccatatcgatgaggaagtgggtttcgcactgcccaatccacaggaaaaccttcccgatttctataatgattggatgtttatagctaagcacctccccgatctgatcgaaagcggccagttaagggaacgcgtggaaaaactgaatatgctgtctatagaccacttaactgaccacaagtcacagcggctttag

SEQ ID NO: 397 - DNA, 543 bp, Artificial Sequence
  Description of Artificial Sequence: Synthetic Transcript Sequence
atggcacacgcgatggagaatagttggaccataagcaaggaatatcatatagacgaggaagtggggttcgccctccccaatcctcaggagaatctgcctgacttttataatgattggatgttcatagccaaacacctcccggaccttatagagagtgggcagttgagagagcgggtcgaaaaactgaacatgctctccatcgatcatctcacggaccacaaaagccagcgcttggccagactagtgctggggtgtatcacaatggcatacgtgtggggaaaggggcatggggacgtgcggaaggtcctcccacgtaatatcgctgttccctattgtcagctcagcaagaagctcgaactccctccgattctggtgtacgccgattgtgtcctggctaattggaaaaagaaggacccgaacaagccactcacttatgagaacatggacgtcctcttcagtttccgtgacggagattgttccaagggcttttttcttgtctcattgttagtggaaattgctgccgcttcagctattaaggtctag

SEQ ID NO: 398 - DNA, 1212 bp, Artificial Sequence
  Description of Artificial Sequence: Synthetic Transcript Sequence
atggcccatgccatggaaaattcctggacgatttcaaaagaatatcacattgacgaggaggttggatttgccctacccaacccccaggaaaatcttcccgacttctataacgactggatgtttatcgccaaacacctaccagatctgattgaatcaggccagctccgggaacgggtcgaaaagctgaatatgctttctatcgaccacctcactgatcacaaaagccagcgccttgctcggctagtccttggatgcataactatggcttatgtgtggggaaagggacatggagatgtccgcaaagtactgccccgaaatatagcagtaccttactgtcaattgtccaagaaactcgagctgccacctatcctggtgtatgcggactgtgtgttagccaactggaagaagaaagaccccaacaagcccctcacgtacgagaacatggatgttctgttcagctttagagatggtgattgttctaaagggttttttttggtgagccttcttgtggagatcgccgcagccagcgcaatcaaggtgatacccacagtgtttaaggcaatgcaaatgcaagaaagggatacgctcttaaaggccttgctcgagattgcttcatgcctcgagaaggcactccaggttttccatcagatccatgatcacgttaaccctaaagcgtttttctctgtcctgcgcatctacctgtcagggtggaaaggcaaccctcagttatctgacgggctggtttacgaggggttctgggaggacccgaaggagtttgccggaggatccgccggacagtcatctgtgttccagtgttttgacgtactgctgggtattcagcaaactgccggtgggggacacgccgcacagtttctgcaggacatgcggagatatatgcccccagcccacagaaactttctgtgttcactggagagtaacccatcagtccgtgagttcgtgttaagcaagggggatgccggactgagggaggcctacgacgcctgcgttaaagcgttggtaagcttgcgctcgtatcacctacagattgttaccaagtacatcctgattcctgcctcacagcagccaaaggagaacaagacctcagaagatccaagcaaactcgaagcaaagggcaccggcggaacagaccttatgaattttcttaaaacagtcagatcaactacagaaaaaagcctcttaaaagagggctag

SEQ ID NO: 399 - DNA, 144 bp, Artificial Sequence
  Description of Artificial Sequence: Synthetic Transcript Sequence
atggcccacgctatggaaaactcatggaccatctcaaaagaatatcacatagatgaggaggtcggctttgctctccccaatcctcaagagaatctgccagatttttataacgactggatgtttattgcaaaacacctgccatag

SEQ ID NO: 400 - DNA, 1224 bp, Artificial Sequence
  Description of Artificial Sequence: Synthetic Transcript Sequence
atggaaccacatcggccaaacgtgaagacagcggtaccgctctccctcgagtcataccacatttctgaggagtacggatttctgttgccggattcactgaaagaacttcctgaccactacaggccctggatggagatcgctaacaaactgccccaactgatagacgcccaccagctacaggcccacgtggacaaaatgccacttttatcgtgccaatttctgaagggtcatagagagcaacgcttagctcatctggttctgtcgtttctcaccatggggtacgtgtggcaggagggggaggcccagcccgctgaggtgttgccccgaaatttagctttgcccttcgtggaggtgtcccgcaatctgggcctgccacccatcctggtgcatagcgatttagttctaaccaactggaccaagaaagatccagacggcttcttagagattgggaacttggagacgattatctccttccccggaggagagtctctccacgggtttattcttgtgacggccctcgtggagaaagaggcggtccccggaatcaaggcgctggtgcaggcaaccaatgctatactgcagcctaaccaagaagccttgctgcaggccctccagaggctgcgactgtccattcaagacatcaccaagacactaggacagatgcacgactacgtggacccggatattttttatgccggaatccgcatctttctgtccgggtggaaggacaacccggctatgcccgcaggtctgatgtacgagggagttagccaagaacctttgaagtacagcggtggatccgctgcacagagcaccgtgttgcatgcttttgacgaatttctcggaatccgccacagcaaagaatccggagacttcctctaccggatgagggactacatgccaccctctcacaaggcttttatcgaggatatccactctgcgccaagcctcagagactatatcctgtcctctgggcaggatcatctgttaacagcatataatcagtgcgttcaggccctcgcagagctgcgttcatatcacatcaccatggtcacaaaatatctgattacagcggctgctaaagccaaacatgggaagcctaaccaccttcccggaccgcctcaggcgttaaaagaccgaggaaccggaggcacagctgtcatgtcattcttgaagtcggtgagagataagacccttgagagtatcctgcatccgcgtggttag

SEQ ID NO: 401 - DNA, 1263 bp, Artificial Sequence
  Description of Artificial Sequence: Synthetic Transcript Sequence
atgcttcacttccactactacgacacaagtaacaaaatcatggagcctcaccggccaaacgtcaagacagcggtgccacttagtttggaatcatatcatattagcgaggaatacgggtttttgttgccagacagcctcaaagaactcccagatcactataggccttggatggaaatcgcgaataaactgccccagctgattgacgcccatcagctgcaggcccacgttgacaagatgccactactgtcatgccagttccttaagggtcatcgggagcagcgactagctcatttggtgctttcatttctgacaatgggctacgtgtggcaggagggagaagcacagcctgctgaggtgctgccacggaacctggcattaccctttgtcgaggtttcacgtaatttggggctgccccctattctggtgcactctgacctggtgctgacgaattggactaaaaaggaccccgatgggttcttggagatcgggaacctggaaaccattataagcttccctgggggagagtctcttcatggtttcattctcgtgaccgcacttgtggagaaagaagccgtaccagggatcaaggcacttgtccaagcaactaacgcgatattgcagccaaaccaggaggccttactgcaggcgctgcagcgattgagattgagcattcaagatattacaaaaactctgggccagatgcatgactacgtggatcccgacattttttacgccggaataaggattttcttgtctggctggaaagacaatcctgccatgcccgcagggctgatgtatgagggtgtgagtcaggaaccccttaaatacagcggaggatctgcagctcagtctaccgtcctgcatgcctttgacgaattcttaggcatcagacattccaaagagtcaggagatttcttgtaccgcatgcgcgattatatgcccccttctcataaggctttcattgaggatatccactctgctccctctctccgggattatattctctcctctggccaagaccaccttcttacagcttacaatcagtgcgtgcaggctctcgcagagttacgctcctaccacattacaatggtgacgaagtacctcatcactgccgcagctaaggctaagcacgggaaaccaaatcacctaccaggtcctccacaggcactgaaagataggggtactggaggcactgccgtcatgtctttcctcaagtcggttagagataagaccctcgagtcgattttgcaccctcggggttag

SEQ ID NO: 402 - DNA, 537 bp, Artificial Sequence
  Description of Artificial Sequence: Synthetic Transcript Sequence
atgcattcttctgctctactgtgttgcctggtcttactgaccggcgtgagggctagtccaggccaaggtactcaaagcgaaaactcatgcacacactttcctggcaacttgccaaatatgctgcgtgaccttcgggacgcattcagtagagtgaagacattcttccagatgaaagatcagctagacaatttgctccttaaggaaagcctgctggaagacttcaaagggtatctcgggtgccaggcactgtctgagatgatccagttttacctggaggaggtgatgcctcaggcagagaatcaggatcctgacattaaggcacacgtcaattccctcggtgaaaatctaaaaacactgcgactccgcttgagaaggtgccatcgattcctgccatgtgaaaacaagtccaaagccgtagaacaggttaagaacgccttcaataagctgcaggagaagggcatctacaaagctatgagcgaattcgatatattcatcaattatatcgaagcttacatgaccatgaaaattcgaaattag

SEQ ID NO: 403 - DNA, 762 bp, Artificial Sequence
  Description of Artificial Sequence: Synthetic Transcript Sequence
atgtggccacccggaagtgcctcacagcccccaccctcgccagcagccgcaaccggcctccatcctgccgcaagacccgtctccttacagtgtagattgtccatgtgtcctgccaggtcgctgctgctagttgccacactggtactattagaccacctgtcactggcccgaaatctcccagtagccacgccagaccctggcatgtttccttgtttacatcacagccagaatctgcttcgcgcagtatccaatatgctacagaaggctaggcagacactagaattctacccatgcactagtgaggaaatcgaccatgaagacattaccaaggacaaaacctcaacagtcgaagcgtgtctgcctttagaactgacaaaaaatgaatcctgcctcaactcaagagaaacctcatttatcaccaatggaagttgtcttgccagcaggaaaacttccttcatgatggccttgtgtctttctagtatctatgaagacttgaagatgtaccaggtggagttcaaaacaatgaacgcaaaactgttgatggacccaaagcgccagatatttctggaccagaacatgctcgccgttatcgatgaactgatgcaggccttaaactttaatagcgagaccgtgcctcagaagtcatccctagaggagcctgacttttataagactaaaattaagttatgcatcctcctgcatgccttccgcatcagggcagtgacgattgaccgcgtcatgagttacttgaacgcctcgtag

SEQ ID NO: 404 - DNA, 720 bp, Artificial Sequence
  Description of Artificial Sequence: Synthetic Transcript Sequence
atgtggccccctggttccgcttcccaaccacccccatctcctgcagccgctactggtctacaccccgctgcccgaccggtgagcttacagtgccggctgagcatgtgcccagccaggtctctcctactggtggccacactcgtgctgctggaccatttatccctggcgaggaacttaccagtggcaacacctgatcctggcatgtttccctgcctgcaccactcccagaacttgctaagagccgtttcgaatatgctgcagaaagccagacaaaccctcgagttttacccatgcacaagcgaggagatcgatcacgaagatatcaccaaggacaaaacttcaaccgtagaagcctgtctccctctggaacttaccaaaaacggctcctgcctcgcgagccgtaaaacttcctttatgatggccctatgcctcagtagtatttacgaggatcttaagatgtatcaggtggagttcaagactatgaacgctaaacttctcatggatccgaaaagacagattttccttgaccagaacatgctcgcagtgattgacgagctcatgcaggccttaaactttaactccgaaactgttccgcagaaatcctcactcgaggaaccagatttctataaaacaaaaattaagctttgcattctgctgcacgcatttcggatccgtgccgtgactatcgaccgagtgatgtcctacctcaacgcctcatag

SEQ ID NO: 405 - DNA, 648 bp, Artificial Sequence
  Description of Artificial Sequence: Synthetic Transcript Sequence
atgtggccacctggatccgccagccagccacctccttcacccgctgccgctactggcctccatccggcagccagaccagtgtccctgcagtgtcggctttcaatgtgtccagccagaagtctgctcctcgtcgctacgctcgtcctgctcgatcatctgtccttggcacggaatttgccagtggctacacctgatcctgggatgttcccatgtctgcatcacagccagaacctgttgcgagctgtttccaacatgttgcagaaaaatgaatcatgcctcaactcacgagaaacgagcttcataacaaacggaagttgcctggcgtcaaggaagacatctttcatgatggccttgtgcctgtctagtatttacgaggacctgaaaatgtaccaggtggaattcaaaacaatgaacgcaaagttactgatggaccctaagagacagatcttcctcgaccagaacatgcttgcagtgatcgatgagttaatgcaggctctgaatttcaattctgagaccgtgccccaaaaatcatccctggaggagcctgacttttataagaccaagatcaaactttgtatattgcttcacgcattccggatccgcgcagtgaccattgatcgcgtgatgtcttacctgaatgcctcatag

SEQ ID NO: 406 - DNA, 429 bp, Artificial Sequence
  Description of Artificial Sequence: Synthetic Transcript Sequence
atgagcctgttgccggtcccatataccgaagccgcttccctgtccaccggatctacggtcacaataaagggcagacccctagcatgttttctgaacgagccatacctacaggtggatttccacacagagatgaaggaggaatcagatattgtgttccacttccaggtttgttttggcaggagagtggtgatgaactcaagggagtatggcgcttggaagcagcaggtagagagcaagaacatgcctttccaagatggccaagagttcgagctatccattagtgttctgccagacaaatatcaggtcatggtaaacggccagagtagctacacatttgaccataggatcaagcctgaggcagtaaaaatggtccaagtgtggcgcgatatctcactgaccaagttcaatgtgtcctatctcaagcggtag

SEQ ID NO: 407 - DNA, 657 bp, Artificial Sequence
  Description of Artificial Sequence: Synthetic Transcript Sequence
atgagtttcgtaggggagaactcgggggtgaaaatgggaagcgaggactgggaaaaggacgaacctcagtgttgcttggaagatcccgcaggctccccactggagcctggaccatcactgcctactatgaattttgttcatacaagtccgaaagtcaaaaatcttaaccccaaaaagttctccatccatgaccaagaccacaaagtgctcgtgctggattcaggtaatctgatcgctgtcccagacaagaactatattcgtcctgagattttcttcgcccttgcctcttcgctctcatccgcaagcgccgaaaaagggagcccaattttactgggggtttccaaaggagagttttgtttatattgcgacaaggacaagggacagtcccacccatccttgcaactcaaaaaagaaaagctgatgaagcttgcggcacagaaggagtccgctcgcagaccattcatcttttatcgagcccaggtgggctcatggaacatgctggaatctgccgctcacccgggatggttcatctgcacgtcttgcaactgcaacgagccagtgggagtcacagacaagtttgagaatagaaagcatatcgagttcagctttcagcctgtgtgtaaagcggagatgtccccgagcgaggtgtctgactag

SEQ ID NO: 408 - DNA, 579 bp, Artificial Sequence
  Description of Artificial Sequence: Synthetic Transcript Sequence
atgagcgggtgcgacaggagagagactgaaaccaagggcaaaaattcttttaagaaacgactaaggggaccaaaagtgaagaatcttaaccctaaaaagtttagcattcacgaccaagaccataaagttttagtgctggattcagggaacctgattgccgtacccgacaaaaactacatcagacctgagattttttttgcactggccagtagcctgtcctctgccagcgctgaaaaggggtctccaatccttttgggtgttagcaaaggcgaattctgcttgtactgcgacaaagataagggccagtctcaccctagcctacaactgaagaaggagaaactaatgaaactggccgcacagaaagagtccgccagaagaccattcattttttatcgggctcaggttggtagttggaacatgttagaaagtgccgctcatccaggttggtttatttgcacctcctgtaattgcaacgagcccgtgggtgtaactgacaaatttgagaatcgcaagcacatcgaattttcttttcagcccgtttgtaaggctgaaatgagtccctcagaggtttctgattag

SEQ ID NO: 409 - DNA, 474 bp, Artificial Sequence
  Description of Artificial Sequence: Synthetic Transcript Sequence
atgtccttcgtcggcgagaacagcggcgtgaagatgggctctgaggactgggagaaggacgaaccacagtgttgtttagaagagatcttttttgctctcgcctccagccttagcagcgctagcgccgagaaaggaagtccaatcctgctgggcgtgagcaaaggagaattctgcttgtattgcgacaaggataaaggacagagtcaccccagcctgcagcttaagaaagagaaactgatgaaactcgctgcacaaaaggagtcagcccgacgtcccttcatcttttatagggctcaggtaggctcttggaatatgctggaatccgctgcccaccccggttggttcatctgtactagctgcaattgcaacgagcccgtaggggtcacagacaagttcgaaaacagaaaacatattgagttttcatttcagcccgtgtgcaaagccgagatgagcccctcagaggtgtcagactag

SEQ ID NO: 410 - DNA, 594 bp, Artificial Sequence
  Description of Artificial Sequence: Synthetic Transcript Sequence
atgtctttcgtcggcgagaattccggcgttaagatgggctccgaggactgggagaaagacgagccccagtgctgtttagaaggacctaaagtgaaaaacctcaatccaaagaaatttagcatccatgaccaggatcataaagttctagtgctggactccggcaatttgatcgccgtgcctgataagaactacattaggcctgaaatatttttcgctctggcttcaagtctgtccagcgcaagcgccgaaaagggttctccaatcctgttaggagtctccaaaggagagttctgtctgtactgtgataaggataaggggcagtctcacccatctttacagttgaagaaggagaagctgatgaagctcgccgcacagaaggagtccgcccgtcgacctttcattttctatagggctcaggttggttcttggaacatgttggagtccgcagcccacccaggctggttcatttgtacatcctgcaattgcaatgagcctgtaggcgttaccgataaattcgagaacagaaaacatatcgaattctctttccaacccgtgtgtaaggcggagatgagcccctccgaagtctctgattag

SEQ ID NO: 411 - DNA, 537 bp, Artificial Sequence
  Description of Artificial Sequence: Synthetic Transcript Sequence
atgtcatttgtcggggagaattccggcgtcaagatggggagtgaggattgggaaaaggacgaacctcagtgctgtctcgaagatcccgcaggctcacccctcgagcccggtccttcactgcccacaatgaacttcgtgcacacaaagattttctttgcgctggcctcgagcttgtcaagtgcgagcgcagagaaggggtcacccatcctactcggggtgtcgaagggagaattttgcctttattgtgataaggataaagggcaatcgcatcccagcctgcagttgaagaaggagaagctgatgaaattggcggctcagaaggaaagtgctagacgcccttttattttctacagggcccaggtgggctcatggaatatgctggaatctgctgctcaccccggttggtttatatgtacctcatgcaattgcaatgagcctgtgggcgtcactgacaaattcgaaaaccgaaagcacattgaattcagcttccagcctgtgtgcaaggccgagatgagtcctagcgaggtgtcggactag

SEQ ID NO: 412 - DNA, 1344 bp, Artificial Sequence
  Description of Artificial Sequence: Synthetic Transcript Sequence
atgattccaacattcacagctctgttgtgcctgggtctgtctctcggccctcggacccacatgcaggccggtccactcccaaaacccaccctgtgggccgaacccggatccgtgatttcttgggggaacagcgtcaccatctggtgccaggggaccctcgaagcacgcgagtatagactcgataaggaagagagccccgcaccatgggaccggcagaacccgctggagccaaaaaataaagccagattctctataccttccatgactgaggactacgccggaaggtacaggtgctattaccgttctccagtgggctggagccagcccagcgacccattagagctcgtgatgacgggtgcgtacagtaagccgaccctatcagcattaccgagccccctggtgaccagtgggaagagtgtgactctcctctgtcaaagcagaagccctatggacacgtttctgcttatcaaagaaagagcagcccaccccctcctgcatctgcgtagcgagcacggagcacaacagcaccaggccgaatttcccatgtctcctgtgacaagcgtgcatggaggaacgtatcggtgcttctccagccacggcttcagtcattacttactgtcccatccctcagaccccctcgagttaattgtttccggatccctagaggacccaagaccatcccccacacgatctgtctctacggccgctggccctgaggatcagcctctgatgccgaccgggtccgtgccccactccggcctccgaagacactgggaagtgctcattggggtccttgtggtgtccatactgctcctgagtctgctcttgtttctcctgctacaacactggcggcaagggaaacaccgaactctagctcagcgacaagcagacttccaacgccctccaggagcagccgagccagaacccaaggacggaggcctccagagacggtcatcccccgcagctgacgtgcagggcgaaaacttctgcgccgctgtgaagaatacacagccagaagacggcgtggaaatggacacacgctccccacacgatgaagaccctcaggctgttacatatgccaaggtaaagcacagccgcccacgccgagaaatggcctccccaccctccccgctgagcggagaatttctggacactaaagataggcaagcagaagaggatagacagatggacactgaggcagccgcatcagaagcgccacaagacgtgacctacgctcagctgcatagttttacccttaggcagaaagctacagaaccgcctccgtctcaagaaggtgcctctccagctgagccctctgtgtatgccaccctggcaatccattag

SEQ ID NO: 413 - DNA, 636 bp, Artificial Sequence
  Description of Artificial Sequence: Synthetic Transcript Sequence
atggtagctcataaccaggtggcggctgataacgccgtgagtaccgcagccgaacccaggaggagaccagagccttcctccagctcaagcagttctcctgccgctcctgcccgaccgcgtccatgccccgcagtgcccgctcccgctcccggagatactcattttagaacttttagaagtcatgcagattaccggagaattacaagagcttctgccttgcttgacgcttgcgggttctattgggggcctctaagcgtgcatggtgcacatgagaggcttcgtgccgaacccgttggtacattcttagtcagggactcccggcaaaggaattgcttctttgccctgtcggtgaagatggctagcgggcctacctccattagggtccatttccaagccggaaggttccacctggacgggagcagagagtccttcgattgcctcttcgaattattggaacactacgttgccgctcccagacgtatgctcggcgcaccactccggcaacgacgtgttcggcctcttcaggagctctgtagacagcgtatagtggccactgtcggacgagaaaacctggcaagaattccactgaaccccgtgctacgtgattacttgtccagttttccctttcagatttag

SEQ ID NO: 414 - DNA, 1596 bp, Artificial Sequence
  Description of Artificial Sequence: Synthetic Transcript Sequence
atggcggcaactctggacctcaaatctaaagaggagaaggatgcagagctggacaaacgcatcgaggcccttcgaagaaaaaatgaagccctgatcaggcgttaccaggaaattgaagaggatcgcaaaaaggcagaacttgagggggttgctgtgacagcccctcggaaaggtagatcagttgagaaggagaatgtagctgtcgaaagcgaaaagaacctgggtcccagcagacggtcccctgggacccctcgccctcctggcgctagcaaaggagggagaacccctccccaacaagggggacgggcaggaatgggcagagcttcccgcagctgggagggttccccaggggaacagccacgaggcggaggtgctggagggaggggaaggcggggaagaggcagagggtctccacatctttcaggcgctggggatacttctataagcgatcggaaatccaaggagtgggaagagaggcgacggcagaacattgagaagatgaacgaggagatggagaaaatcgcggagtatgagcgaaaccagcgcgagggtgtgcttgagcccaatcctgtgcgaaactttctcgatgatcccaggcgacgttcagggcctctggaagaaagcgagagggacagacgtgaggagtcgaggaggcacggcaggaattggggtggacctgatttcgagcgcgttcgctgcggactggaacatgagcgccagggtcggagggcgggactgggcagtgcaggggatatgacactgagtatgacggggagggaacgctcggagtaccttcgttggaaacaggaacgtgaaaaaatcgatcaagagcgcctccagcggcaccgtaagccgactgggcaatggaggagagaatgggacgccgagaagacagacggtatgtttaaggacggtcccgtacctgcacatgagcctagccatagatacgacgatcaggcctgggctcgccctcctaaaccaccgacatttggagagttcctcagccagcacaaggccgaggcctccagtcgtcgaaggcgcaaaagcagcaggcctcaggcaaaggccgcaccccgagcctacagtgatcatgatgatcgctgggagacaaaggagggtgccgcaagtccagcacctgaaacaccccagcctacgagtcctgagacctcgcctaaggaaacgccaatgcaaccccctgaaatccccgctcccgctcaccgacctccagaagatgagggagaagaaaatgagggagaggaggatgaggaatgggaggacataagtgaagacgaggaggaggaggagattgaggtagaagaaggggacgaggaagagccggctcaggatcaccaagcacctgaggctgcgcctactggcattccgtgctccgagcaggcccacggcgtaccattcagcccagaggaacccctgctcgagccccaggcaccaggcacacccagctcaccatttagccccccttcggggcaccagccagtttctgattggggggaagaggtggagttaaattcacctcgtacgacccatctggcaggagccctgagccctggggaggcctggccttttgaaagtgtgtag

SEQ ID NO: 415 - RNA, 1062 nt, Artificial Sequence
  Description of Artificial Sequence: Synthetic Transcript Sequence
auggagcucacugaguuacuucuuguggugaugcuguuguuaacggcgagauugacccucucaucuccagccccacccgccugcgaccuuagggugcugaguaagcuucuuagagacucccauguacuacacagccgucucucccaaugucccgaggugcauccucuuccuacaccgguccugcugccagcugucgacuucagucugggagaauggaagacucagauggaggaaacgaaagcccaggauauacucggggcugugacccuucugcuggagggagucauggccgcucgaggccagcuggggccuaccuguuuauccagccuccucggccaauuguccggacaaguaagauuauugcuuggagccuuacagagucuccuggguacacagcuaccuccacaaggccgcacuaccgcucauaaagaccccaaugcuauuuuucugucauuccagcaucuguuaagaggaaaggucagguucuugaugcucguggggggcuccacucugugcguaaggcgagcccccccuaccacagcagugccaucucggaccucccuggugcuuacccucaaugaacugccuaacagaacauccggucucuuggagacaaacuuuacugccucugcucggacaaccggaucgggacugcugaaguggcagcagggcuuucgggccaaaauucccggacuacucaaucagacaucaaggaguuuggaccaaaucccgggguaccugaaucguauacaugagcuuuuaaacggcacucggggucuguuccccggccccucucgucguacacucggcgcccccgacauaucgucuggcacgucugacacagguucccugcccccuaacuugcagccuggcuacucucccuccccgacucaccccccaaccggacaguauacccuuuucccucugccacccacacugccaacuccagugguacaacuacacccauuguugccagauccuagugcacccacccccacccccacuuccccucugcuaaacacgaguuauacacacucucagaaccuuucccaagaagguuag

SEQ ID NO: 416 - RNA, 537 nt, Artificial Sequence
  Description of Artificial Sequence: Synthetic Transcript Sequence
augacgguuuuagcuccagcuuggagccccaccacuuaccuacuuuugcuucuguuguuguccucuggccucucuggcacccaggauugcuccuuucagcacaguccuaucuccuccgacuucgccgucaaaauuagagagcucucagacuaccuucuccaggauuauccugugacaguugccuccaaucuccaggacgaagaacugugugggggccucuggcgacucgugcuggcucagagguggauggaaagacuuaaaacuguggccggcucaaagaugcaaggucuucuggagagaguuaauacugagauucauuucgugacaaagugcgcuuuucagccaccaccuuccugcuuaagauucguccagaccaauaucagccgcuugcugcaggaaacuucagaacagcucgucgcccucaagccuuggauaacccgccagaacuuuaguaggugcuuagaacuccagugccagcccgucgaaacaguuuuucauagaguuagccaggauggccuggaccuacugacgucuuag

SEQ ID NO: 417 - RNA, 762 nt, Artificial Sequence
  Description of Artificial Sequence: Synthetic Transcript Sequence
auguggcccccaggaagugcuucucaaccuccaccaagccccgcggccgcuacuggacugcauccugccgcccgccccgucucucuccaaugucgucugucaaugugcccggcuagguccuuacugcucguggccacucuagugcugcuggaccaccuuagccuggcccgcaaucugccaguggccaccccggaucccggcauguuucccugucuccaccauucucagaaccuuuugcgggcggugucuaacaugcugcaaaaagcaaggcaaacacuggaguuuuacccaugcaccucugaagaaaucgaccacgaggacauaacuaaagauaaaacaaguacgguggaagcuugcuuaccucuugagcugaccaagaaugaguccugcuugaacagccgcgagacgucuuuuauuacaaacggcucaugcuuagcgucacgaaaaacuagcuucaugauggcucugugccugucaucaauuuaugaggaucucaaaauguaccagguggaauuuaaaacgaugaaugcgaaacuguuaauggacccaaagcgccagauuuuccuugaucagaauaugcuggcagugaucgacgaacugaugcaggcacuuaauuucaauagcgagacggucccgcagaaaucaucccucgaggaacccgacuucuauaagacuaaaauuaaacuguguauacucuuacacgccuuuagaauacgggcugugacuauugauagggugaugagcuaccucaaugcaucuuag

SEQ ID NO: 418 - RNA, 720 nt, Artificial Sequence
  Description of Artificial Sequence: Synthetic Transcript Sequence
auguggccaccaggaagcgcaucccagccacccccaucucccgccgcugccacgggccuccaucccgcugcacguccggucucauugcagugcagauuaagcaugugccccgccagaucuuuauuacugguagccacccugguuuuacuagaucaccucucacuagcucgcaaucuaccgguugcuacccccgacccgggcauguuucccugcuuacaccacucccagaacuugcugcgggcaguguccaauaugcuccaaaaggcucggcaaacauuggaguuuuacccaugcacaucagaggagaucgaccaugaggauauuacuaaggacaaaacauccaccgucgaggccugucugccucuggagcugacuaaaaaugggagcuguuuagcgucuaggaagacaucuuucaugauggcauuaugucuguccagcauuuaugaggaucuuaagauguaucaaguggaauuuaaaaccaugaacgccaaacuccugauggauccuaagcgucaaauuuuccuggaucaaaauaugcuugcggugaucgaugagcuuaugcaagccuuaaacuuuaauuccgagacagucccacaaaagucgagucucgaggagcccgauuuuuauaagacuaagauaaagcuguguaucuuacuucacgccuuucgaauccgagcagucaccaucgauagaguuaugucauaccugaaugccucuuag

SEQ ID NO: 419 - RNA, 648 nt, Artificial Sequence
  Description of Artificial Sequence: Synthetic Transcript Sequence
auguggccccccgggucugccagccaaccgcccccaagucccgccgcagccacugggcuucacccagcugcccgucccgucucgcugcagugcaggcuguccauguguccugcccguucgcuguuacuggucgccacgcuagugcuccuggaucaccuuucccuagcuagaaaucuuccuguugcaacccccgacccaggaauguuuccaugccuacaccacucacaaaaccuauugcgugcuguguccaauaugcuacaaaagaaugagucuugccugaauagucgagaaaccucauucauuaccaauggcuccugucucgccagcagaaagacuagcuuuaugauggcacugugcuuaucaucgauuuacgaggauuuaaaaauguaccagguugaguuuaagacaaugaaugccaagcuccugauggaccccaagagacagaucuuucucgaccagaacaugcuggccguaaucgacgagcugaugcaggcucugaacuucaacuccgagaccgugccgcagaagucaucuuuggaggagcccgauuuuuacaaaacaaaaauuaaacugugcauccugcuccaugccuuccgcauccgggcugucacgaucgaccggguuaugaguuaucugaaugcaucguag

SEQ ID NO: 420 - RNA, 1062 nt, Artificial Sequence
  Description of Artificial Sequence: Synthetic Transcript Sequence
auggaacuuaccgaacugcuacuaguaguaauguuacuucugaccgcuaggcuuacucugucauccccagccccccccgccugugaucugaggguccuuuccaaacuccuccgggauagucacgugcugcacagucgacucucccagugcccagaagugcauccccugccuacucccguucuccuucccgccguggauuucucccugggagaauggaagacccagauggaggagacuaaagcccaagacauccugggugccguaacucugcuguuagaaggggugauggccgcgagagggcagcugggucccacuuguuugaguagucuguuaggucagcugagcggucaaguccgucugcuacugggcgcucuccagagucuucuaggcacccaacuaccaccucaaggacgcacaacugcucacaaagauccuaaugcaauuuuucucucauuucaacaccuccuucgggggaagguuagguuucuuaugcucgucggcggcagcacccugugcgugagaagagcgccaccuacgaccgcugucccuucgaggacaucccuuguauuaacccugaacgaauuaccuaaccggacuagcgggcugcuugaaaccaacuucacagcaucugcuagaacuacuggguccgggcugcugaaauggcaacaaggcuuccgcgccaagauuccuggccuguuaaaucaaaccucccgcucccucgaccagaucccuggcuacuugaaccgcauucacgaacuguuaaacggcacuagaggccuguuccccggaccuucacgcagaaccuuaggagccccugauaucuccucaggcacuuccgauacuggcucgcucccaccuaauuuacaaccgggcuacuccccaagccccacacacccaccuaccggccaauacacucuuuuuccacugccuccaacgcuccccacuccugucgugcagcuucaccccuuauuacccgaccccucugcucccacuccuacccccacaagcccccugcucaauaccuccuauacacauucucagaaucucagccaggaaggcuag

SEQ ID NO: 421 - RNA, 537 nt, Artificial Sequence
  Description of Artificial Sequence: Synthetic Transcript Sequence
augaccguucucgccccagcuugguccccuaccacuuacuuauugcugcuacugcugcucagcuccggauuaagcgggacccaagacugcucguuccaacauagucccauuucuucugacuucgcugugaagauucgcgaacuaagugauuaucuccugcaggauuaucccgugacuguggccagcaacuuacaggaugaagaacugugcggaggacuguggagauuaguucuggcacaaagauggauggaacggcuuaagacaguggccggaucuaaaaugcagggcuugcuugaaaggguaaauacugagauccauuucgucacaaaaugugcuuuccagccuccccccucaugucuucgcuucgugcaaacaaacaucaguagacuccuccaggagaccagcgaacagcuaguggcccugaaacccuggauaacccgccagaacuuuucccgcugccucgagcuacagugucaacccgucgagacaguguuccaucgagucagucaggacggccuugaucuacucaccagcuag

SEQ ID NO: 422 - RNA, 762 nt, Artificial Sequence
  Description of Artificial Sequence: Synthetic Transcript Sequence
auguggccuccuggaagcgcgucccaaccaccuccuucccccgcagccgcuaccggacugcaccccgcggcucgaccagugucccugcaaugucgccuuagcaugugcccugcucgaucccuccuccucguugcaacauugguacuguuggaccaccugucccuggcccgaaauuugccuguugcgacucccgauccugguauguucccaugucuucaccacagucagaaccugcugcgcgcugucucgaacaugcuccaaaaagccaggcaaacucucgaauuuuaucccuguacaagcgaagaaaucgaccacgaggacauaacuaaagauaaaacaaguacgguggaagcuugcuuaccucuugagcugaccaagaaugaguccugcuugaacagccgcgagacgucuuuuauuacaaacggcucaugcuuagcgucacgaaaaacuagcuucaugauggcucugugccugucaucaauuuaugaggaucucaaaauguaccagguggaauuuaaaacgaugaaugcgaaacuguuaauggacccaaagcgccagauuuuccuugaucagaauaugcuggcagugaucgacgaacugaugcaggcgcuuaauuucaacagcgaaaccgucccgcagaaaucaucccuagaagagccagauuuuuacaaaacuaaaauuaagcuguguauccuccuccacgccuuucggauacgggccguaacuauugaucgaguuaugucauaccucaacgcgagcuag

SEQ ID NO: 423 - RNA, 720 nt, Artificial Sequence
  Description of Artificial Sequence: Synthetic Transcript Sequence
auguggcccccuggaagcgcuucccagccaccaccaucuccggcugccgccacuggauugcacccugccgcucgaccaguuucgcuccaaugucgccuguccauguguccugcucgaagccuccugcuaguggcaacucuggugcugcucgaucaccugucucuugcccguaaucugccaguggcuacuccugaucccggcauguuucccugccuccaccauagccaaaacuugcuucgcgcaguguccaauaugcuccagaaggcucgacagacccucgaguucuaucccuguacuuccgaagaaaucgaucaugaagacaucaccaaggacaaaaccaguaccguagaagccugcuuaccauuagaauuaacaaagaaugggucaugucucgccuccagaaagacuucauucaugauggcacuuugccuguccagcaucuaugaggaucugaagauguaccagguggaauucaagacuaugaacgcaaaguugcugauggauccuaaaagacagaucuucuuggaccagaacaugcucgcagugauagaugaacugaugcaagcccugaacuuuaacuccgaaaccgugccucagaagucuucccuugaagagccagauuucuauaagaccaagauuaaacuauguauccugcugcacgccuuccggauuagagccgucacuauugaccgcgugaugagcuaccuuaacgccuccuag

SEQ ID NO: 424 - RNA, 648 nt, Artificial Sequence
  Description of Artificial Sequence: Synthetic Transcript Sequence
auguggccacccgggagcgcgagucagccaccccccuccccagcagcugcaacuggccuccaccccgcugcccgcccagugucccugcagugcagacuuucaauguguccugcccgaucccucuugcuggucgcuacccugguacugcuugaucaucugucccuagcccguaaucuuccugucgccacaccggaucccggaauguuuccuugccugcaucacagucagaaccuucugcgugccguaagcaauauguugcagaaaaacgagucuugucuuaacaguagagagacuucuuuuauaacgaacgguagcugccucgccucucgcaagacaucauucaugauggcccugugccuuaguucaaucuacgaggaccuuaagauguaucagguagaauuuaaaacgaugaacgccaaacuguuaauggauccgaagcgucagauuuuucuggaccagaacauguuagcgguuauugaugagcucaugcaagcccuaaauuucaacagcgaaacagugccucaaaaaagcagccuagaggagccagauuucuauaaaacaaaaaucaaauuaugcauccugcuacacgcuuucagaaucagagcuguaaccaucgauagagucaugaguuaucugaacgcguccuag

SEQ ID NO: 425 - DNA, 534 bp, Artificial Sequence
  Description of Artificial Sequence: Synthetic Transcript Sequence
atgcattcctccgctctcctgtgctgcctagtacttctcaccggagtccgggctagcccaggtcagggcactcagtctgagaattcatgtacacacttccctggcaatctccctaacatgcttcgtgacttgagagacgccttctcccgggtcaagacattctttcagatgaaggaccagttagacaaccttctcttaaaggaatcgctgctcgaggacttcaaagggtacctgggatgtcaggcgcttagtgaaatgatacagttttatcttgaagaggtcatgccacaggccgaaaaccaggaccccgacattaaagctcacgtcaattcactgggcgaaaatctgaaaacccttcggctgagacttcggaggtgccacagatttctgccatgcgagaataagtccaaggctgtggagcaagttaagaatgccttcaataagctgcaggagaagggcatctacaaggccatgtctgaatttgatattttcatcaactacatagaagcctatatgacgatgaagatccggaac

SEQ ID NO: 426 - DNA, 534 bp, Artificial Sequence
  Description of Artificial Sequence: Synthetic Transcript Sequence
atgcatagtagcgcactattgtgctgcctcgtcctgttgacaggagttcgcgctagccctggccaaggcactcagtcagaaaattcttgtacgcactttccggggaatctaccgaacatgttacgcgaccttcgagatgcgttctcgagggttaaaacgttctttcaaatgaaggatcaattggacaacctacttcttaaagaaagtcttttagaagactttaagggttacttagggtgtcaggcgctgtctgaaatgatccaattttatttggaggaagtaatgccacaagcggaaaatcaggatcctgacataaaagctcatgttaactctctgggcgagaatctaaaaacattgcgtttaaggttgagacgttgccaccgttttctaccctgcgagaataaaagcaaagctgttgaacaagtaaagaacgccttcaacaagttgcaagaaaagggaatttataaagcaatgtcagagtttgatattttcattaactacattgaagcgtacatgacgatgaagataagaaat

SEQ ID NO: 427 - DNA, 534 bp, Artificial Sequence
  Description of Artificial Sequence: Synthetic Transcript Sequence
atgcactcatcggcgctcctttgctgcttagttcttcttacgggtgttcgcgcctcgcccggtcagggaactcaatcagagaactcttgcacacattttccgggtaatcttcctaatatgttgagagatcttcgcgatgcattctcgcgggtcaaaacctttttccaaatgaaagaccagctagacaaccttctgttgaaagaatcgctgctcgaagatttcaagggctacctgggttgccaggccctatcagagatgatccaattttatctcgaagaagtgatgccgcaggctgaaaatcaggatccggatatcaaagcccatgtaaactccctgggggaaaacctgaaaacactgcgtctgcgtctgcgaagatgccatcgatttctgccctgtgagaacaaatctaaagccgttgaacaggtgaagaatgcattcaacaaattgcaggagaaaggcatctacaaagcgatgtcggaattcgatatctttattaattacatagaagcttacatgacaatgaaaatccgcaac

SEQ ID NO: 428 - DNA, 534 bp, Artificial Sequence
  Description of Artificial Sequence: Synthetic Transcript Sequence
atgcactcaagtgccctattatgttgtcttgtccttcttacaggagtacgggccagtcccgggcagggaactcaatctgaaaattcatgcacacattttcctgggaacctccccaatatgttgagagatctccgggatgccttctctagagtgaaaacatttttccagatgaaggatcagcttgataacctactactgaaagaatcccttctggaggattttaaaggatacttagggtgccaggctctatctgaaatgatacagttttacctggaagaagtgatgcctcaggcggaaaatcaggatcccgatatcaaagcccatgtcaatagtctaggggaaaacctgaaaacgttgaggctgcgactccgccgttgccatcggttcctaccctgtgaaaataagtctaaggcagtcgaacaggtgaaaaatgccttcaataaattgcaggagaaagggatttataaggctatgagtgaatttgatatattcatcaattatatcgaagcttatatgacaatgaaaattcggaat

SEQ ID NO: 429 - DNA, 534 bp, Artificial Sequence
  Description of Artificial Sequence: Synthetic Transcript Sequence
atgcattcgtcggcgttattatgttgtttagtattactaacgggtgttcgtgcgtcgccgggtcaaggtacgcaatcggaaaattcgtgtacgcattttccgggtaatctaccgaatatgctacgagatctacgagatgcgttttcgcgagtaaaaacgttttttcaaatgaaagatcaattagataatctattactaaaagaatcgttactagaagattttaaaggttatttaggttgtcaagcgctatcggaaatgatacaattttatttagaagaagttatgccgcaagcggaaaatcaagatccggatataaaagcgcatgttaattcgctaggtgaaaatctaaaaacgctacgattacgtctacgacgttgtcatcgatttctaccgtgtgaaaataaatcgaaagcggtagaacaagtaaaaaatgcgtttaataaattacaagaaaaaggtatatataaagcgatgtcggaatttgatatatttataaattatatagaagcgtatatgacgatgaaaatacgtaat

SEQ ID NO: 430 - DNA, 534 bp, Artificial Sequence
  Description of Artificial Sequence: Synthetic Transcript Sequence
atgcatagcagtgcgctgctgtgttgcttagtgttgctgactggggtcagagcatctcctggacagggaactcagtcagaaaactcctgtactcacttccctgggaatctgccaaatatgctcagggacctacgcgacgctttttcccgagtgaagaccttctttcagatgaaggaccagttagacaatctgctgttgaaggagagtctccttgaggacttcaagggctatctggggtgtcaggcactgtctgaaatgatacagttctatcttgaagaagtgatgccgcaggccgagaatcaggacccagacataaaggcccatgtcaacagtctcggagagaatctcaagacactgagattgcggctgcgccgatgccaccgctttctgccatgcgagaacaaatctaaggctgtagagcaggtgaagaatgcattcaacaagcttcaggaaaaaggtatatacaaagctatgtccgaattcgatatcttcataaactacatcgaggcatacatgacgatgaagatcaggaac

SEQ ID NO: 431 - DNA, 534 bp, Artificial Sequence
  Description of Artificial Sequence: Synthetic Transcript Sequence
atgcattcatcggcacttctctgttgccttgtccttcttaccggagtgcgggcatcgcctggacaaggaacccagtccgagaacagctgtactcattttcctggtaacctgcctaacatgctcagggatctgcgcgacgcgttctcgcgggtgaaaacgttctttcaaatgaaggatcagctggacaatctgctgctgaaggagtcactgctggaggactttaaaggctacctggggtgccaggctcttagcgagatgatacagttttacttggaagaagttatgccccaagccgaaaatcaagacccggacattaaggcacacgttaattcccttggcgagaacctcaagactcttcgcttgagacttcgacgttgtcaccgattcctgccgtgtgaaaacaagtcgaaggcagtagaacaagtgaaaaacgcattcaataagctccaagaaaaaggtatctacaaggccatgtccgagtttgacattttcatcaactacattgaggcttatatgaccatgaagattagaaac

SEQ ID NO: 432 - DNA, 534 bp, Artificial Sequence
  Description of Artificial Sequence: Synthetic Transcript Sequence
atgcatagcagtgccctcctgtgttgcctcgtcctcttgaccggtgtgcgagctagccctggtcaaggtacgcaatctgagaactcatgcacccatttccccggcaaccttcctaatatgctgcgcgaccttagggatgcgttttcccgtgtcaagactttctttcagatgaaggatcaactcgacaacctccttttgaaggaatcactgctggaagatttcaaaggataccttggctgtcaggcactgtcggaaatgattcagttttacctggaagaagtcatgccccaagcagaaaatcaagatcctgacatcaaggcacacgtgaactcactgggagagaacctcaagacccttcggctgagacttagacgatgtcaccggtttctcccatgtgagaacaaaagtaaggccgtggagcaagtgaaaaatgcattcaataagctccaggaaaagggtatttacaaagctatgtcggaatttgacatcttcataaactacattgaggcatacatgactatgaagattcgaaac

SEQ ID NO: 433 - DNA, 534 bp, Artificial Sequence
  Description of Artificial Sequence: Synthetic Transcript Sequence
atgcattcgagtgccttactttgttgcctcgtactactcacgggagttagggcatcgccaggccagggaacccagagcgagaacagttgtacacactttcccggtaacttgcccaatatgttgagggatcttcgggacgctttcagcagagtcaagactttcttccagatgaaagaccagttggacaatctgctgctgaaagaatctttgctggaggatttcaaaggatacttgggctgccaagcattaagcgaaatgatccagttctatttagaggaagtgatgccccaggcagagaaccaagacccagatataaaggcccatgtgaactccctgggcgaaaacctgaagacacttaggcttcggctgcgtcgctgccaccggtttcttccctgtgaaaacaagagtaaagccgtcgagcaggtcaagaatgcatttaataaacttcaggagaagggtatttacaaagccatgagtgagttcgatatctttataaattatatagaagcatatatgaccatgaaaatcagaaat

SEQ ID NO: 434 - DNA, 534 bp, Artificial Sequence
  Description of Artificial Sequence: Synthetic Transcript Sequence
atgcactcttcagcgcttttgtgctgtctcgtgttactcacgggcgtgcgtgccagcccgggacagggaacccaatccgaaaactcatgtactcatttcccgggaaacctgcccaacatgctcagggacctcagagacgcttttagtcgggtgaagaccttttttcagatgaaagatcagctggacaatctattactaaaagagagcttactggaggattttaagggatatctcgggtgccaagccctctccgagatgattcagttttatctcgaggaggtaatgccacaggcggaaaaccaggacccggacattaaggcgcacgtcaactcgctgggagagaatttgaaaacactacggctgcgactcaggaggtgccatcggttcctcccatgcgagaacaaaagcaaggccgtggagcaggtgaagaacgcgttcaataagttgcaagaaaaggggatttacaaggccatgtctgaatttgacattttcataaactatatagaggcctatatgactatgaagatccgtaat

SEQ ID NO: 435 - DNA, 534 bp, Artificial Sequence
  Description of Artificial Sequence: Synthetic Transcript Sequence
atgcactcgtctgctcttctctgttgccttgtgctgttgacgggggtgcgagcttcgccaggtcaaggaacgcaatcggagaacagctgtacacacttcccaggtaatttaccaaacatgttaagagatctacgtgacgcattttcaagggtcaaaacgttttttcagatgaaagatcagctagacaacctgcttcttaaggagtccttactggaagatttcaagggatacttaggatgtcaagcactatcagaaatgatccaattctacctggaggaagtcatgccacaagctgaaaatcaagatcctgatataaaagctcatgtcaacagccttggagaaaatctgaaaacgctcagattacggcttagaagatgtcaccgatttctgccatgtgaaaataagtctaaagcagtagaacaggtcaaaaatgcctttaataagttgcaagaaaaaggaatttataaagcgatgtcagaatttgacatttttattaattacattgaggcctacatgacaatgaagatccgaaat

SEQ ID NO: 436 - DNA, 534 bp, Artificial Sequence
  Description of Artificial Sequence: Synthetic Transcript Sequence
atgcatagtagcgctctcctttgctgtcttgtgctgctcaccggagtgcgagccagccccggtcagggcactcagtcggagaattcctgcactcacttcccggggaacctgccgaacatgctgagggacctcagagacgcattttcacgcgtcaaaacgttcttccagatgaaagaccaactcgataacctgctccttaaggaatcgctgctggaagatttcaagggatacctggggtgtcaagcgctcagtgaaatgatccagttctacctcgaagaggttatgccacaggcggagaaccaggatccagacatcaaggcccacgtcaattcacttggtgaaaatctgaaaaccctgcggctccgcttgcgccgctgccaccgctttctcccgtgcgaaaacaagtctaaggctgtggaacaagtgaagaacgctttcaacaagctccaggagaagggaatctataaggccatgtcggagtttgatatctttatcaactacattgaagcatacatgaccatgaagatccggaac

SEQ ID NO: 437 - DNA, 534 bp, Artificial Sequence
  Description of Artificial Sequence: Synthetic Transcript Sequence
atgcattcaagcgctctcctttgttgtctggtgctcctcactggagtgagagcaagccctggtcagggaacgcaatcagagaacagctgtactcatttccctggaaacctgcccaatatgctgagagacttgcgcgatgccttctcgcgagtcaagaccttcttccaaatgaaggaccaacttgacaacctgctgctgaaggaatcgctgcttgaggactttaaaggctacctgggttgccaagctctgtcggagatgattcaattctaccttgaagaggtcatgccacaggcggaaaatcaagatcctgacataaaggcacatgtcaacagccttggagaaaatcttaagaccctgcgccttcgcctccgccgctgtcatcgttttctcccctgcgaaaacaagtccaaagcggtggaacaagtgaagaacgcatttaacaaacttcaggagaagggaatttacaaggccatgtcagagtttgacatattcattaactacattgaagcatacatgactatgaagatccggaac

SEQ ID NO: 438 - DNA, 534 bp, Artificial Sequence
  Description of Artificial Sequence: Synthetic Transcript Sequence
atgcactcctccgcgctgctgtgctgcctggttctcctgaccggagtccgggcctcgccgggccaggggacccagtcagagaattcgtgtactcacttcccaggaaatctccctaacatgctgagagatctccgcgacgccttctcaagagtgaaaacttttttccaaatgaaggaccagctcgacaatctgctgctgaaggaatcgctgctcgaggacttcaagggatacctgggctgccaggcactgtctgagatgatccagttttatctcgaggaggtcatgcctcaagctgaaaatcaggacccggatatcaaggcacatgtcaactccctgggagagaatctgaaaacgctgcgcctcagactccggcgctgtcatcgctttttgccgtgcgagaacaagagcaaggccgtggagcaagttaagaatgcgttcaacaaacttcaggaaaagggcatatacaaggccatgtctgaattcgacatcttcatcaactacattgaagcctacatgaccatgaagatcagaaac

SEQ ID NO: 439 - DNA, 534 bp, Artificial Sequence
  Description of Artificial Sequence: Synthetic Transcript Sequence
atgcactcctcggcactgctctgttgcttggtcctccttaccggagtcagggcgtcaccaggccaaggtacgcagtccgaaaactcatgcacccacttcccagggaatttgcctaatatgctgcgggacctgagggacgcgttttcgcgcgtgaaaacgttttttcagatgaaggatcaactggacaaccttctgcttaaggaatcactgctggaagatttcaagggttacctcggatgtcaagctctttccgaaatgattcaattctaccttgaggaagtgatgcctcaggccgaaaaccaagatcccgatatcaaagcacatgtgaattccctcggcgaaaacttgaaaacgttgcggttgcgattgaggagatgccatcgttttctcccatgtgaaaacaagagcaaggcagtcgagcaagtcaagaacgcattcaataaactccaggagaaaggcatttacaaggcaatgtcggagtttgacatctttatcaactatattgaagcctacatgaccatgaagatccgcaac

SEQ ID NO: 440 - DNA, 534 bp, Artificial Sequence
  Description of Artificial Sequence: Synthetic Transcript Sequence
atgcattcctccgccttgctctgttgcctggtgttgctgacaggtgtgcgcgcttccccaggacagggaacccagagtgagaacagctgcacgcatttccctggtaacctccctaatatgttgagagatctccgcgacgctttcagccgggtgaagactttcttccagatgaaagaccagttggacaacctcctgctgaaagaaagtttgctggaggacttcaagggttacctgggatgtcaggccctgtctgagatgattcagttctacctggaagaggtgatgccacaagcagagaaccaggacccagacatcaaagcccatgtgaacagcctcggcgagaatctcaagactttgcggctgcggctgagacgatgccaccggtttctgccttgcgagaataaatccaaagccgtggagcaggttaaaaatgccttcaataagctccaagagaagggaatttataaggctatgagcgaatttgatattttcataaattatatagaggcctacatgaccatgaagatcaggaac

SEQ ID NO: 441 - DNA, 534 bp, Artificial Sequence
  Description of Artificial Sequence: Synthetic Transcript Sequence
atgcacagctcggccttgctgtgctgcctggtgctgcttaccggagtcagagcatcccccggtcaaggcactcaatcggagaactcttgtacccacttccccgggaatctgccaaacatgctgcgtgacttacgagatgccttttctcgcgtgaaaacgttctttcagatgaaagatcagctggacaatctgttgctgaaagagtctttgcttgaggactttaaggggtacctggggtgccaggcccttagtgaaatgatccagttttatcttgaagaggtgatgccgcaggccgaaaatcaggacccggatataaaggcccatgtgaattcacttggggaaaatttgaaaacactgaggttgcgccttcgccgctgtcatagattcctgccttgtgaaaataagagtaaagctgttgagcaggtaaaaaacgcgtttaacaagttgcaggagaaggggatctacaaggcaatgagtgagttcgatatcttcatcaattatattgaggcatatatgactatgaagatacgcaat

SEQ ID NO: 442 - DNA, 534 bp, Artificial Sequence
  Description of Artificial Sequence: Synthetic Transcript Sequence
atgcactcctctgccctcttgtgttgtctggtgcttctgactggggttagggctagccctggacagggtacccagagtgagaattcttgcacacacttcccgggaaatctccccaacatgttgagagacctgcgggatgccttcagtcgagtgaaaacatttttccaaatgaaggatcagctggacaacctgctgctgaaagagtcactgttagaagactttaaaggatacctgggttgccaggccctttctgagatgatccagttctaccttgaggaggtgatgccccaggccgagaaccaggaccccgatatcaaggcgcatgttaactcactcggggagaatctaaagaccctgcgtctgcggctacgtcgctgccatcgtttcctgccctgcgagaataaatccaaggcagtggaacaggttaaaaacgcattcaacaagctgcaggagaagggaatatacaaagccatgtccgagtttgatatttttatcaattatatcgaggcttatatgactatgaaaatccggaat

SEQ ID NO: 443 - DNA, 534 bp, Artificial Sequence
  Description of Artificial Sequence: Synthetic Transcript Sequence
atgcactcctcggccttgttgtgttgtctggtgctccttactggtgtgcgggcgtcacccggacagggaactcaatccgaaaatagctgtactcattttccaggaaatctccctaacatgctgcgggacctgcgtgatgcattttctagggtcaaaacgttctttcaaatgaaggatcagctcgacaacctccttctgaaggaaagccttcttgaagatttcaaaggctacttgggctgccaagcgcttagcgagatgattcagttttaccttgaggaagtaatgcctcaggccgagaaccaagatccagacattaaggcacacgtcaattctctcggggaaaatctgaaaactctgagacttcgactgaggcgctgccatagatttcttccttgtgaaaacaagtccaaagcagtggaacaagtgaagaacgccttcaataagttgcaagagaaaggaatctacaaggcaatgtcggaatttgacatattcatcaactacatagaggcttatatgacgatgaaaattcgaaac

SEQ ID NO: 444 - DNA, 534 bp, Artificial Sequence
  Description of Artificial Sequence: Synthetic Transcript Sequence
atgcatagcagcgccctgctgtgttgtctggtgctcctgaccggggtgagagcctccccgggccagggtactcaatccgaaaattcctgcacacatttccccggcaaccttccgaacatgttgcgcgatctcagagatgcctttagcagggtgaagacattcttccagatgaaggatcagcttgacaacttgctgctgaaagagtctctgcttgaggatttcaagggatacctgggatgtcaagcactgagtgagatgatccagttttacctcgaggaggtgatgccccaagcagagaatcaggaccctgacataaaagctcatgtaaattccctgggcgagaacttgaagacactgaggttgcgcctgcgaaggtgtcacagattccttccatgcgagaataaaagcaaggccgtggaacaagtgaaaaacgcatttaacaagctgcaggagaaggggatctacaaagccatgtctgagtttgatattttcatcaattatattgaggcctatatgaccatgaaaattaggaac

SEQ ID NO: 445 - DNA, 534 bp, Artificial Sequence
  Description of Artificial Sequence: Synthetic Transcript Sequence
atgcatagcagtgctttgttgtgctgtctggtgttgctgacgggcgtgcgtgcctctcccggtcagggcacccaatcagaaaactcttgtacacattttccaggcaacctgccaaacatgctgcgcgacctacgcgatgcattctcgcgcgtaaagacttttttccagatgaaagaccagctagataacctgctcttgaaggagtcgcttctggaggacttcaagggatatctggggtgccaggctcttagcgaaatgatacaattttacctggaggaggttatgccccaggcggagaaccaggatcccgacattaaagctcatgtgaatagccttggcgagaaccttaagaccctgaggttaaggttgagacgttgccaccgctttctaccatgcgagaacaagtccaaggccgtggaacaggtgaagaacgcgttcaacaagctccaggaaaaaggaatctacaaggccatgagcgaatttgatatttttattaactatatcgaggcttacatgactatgaaaatacgcaat

SEQ ID NO: 446 - DNA, 534 bp, Artificial Sequence
  Description of Artificial Sequence: Synthetic Transcript Sequence
atgcattccagcgcactcttgtgttgcctggtgctgctcaccggtgtccgggcctccccggggcagggaacccagagcgaaaactcgtgcactcacttcccaggaaatctgcccaatatgctccgcgacctgagggacgcgttctcccgggtgaaaaccttcttccaaatgaaggaccaacttgataaccttctgctcaaggagtcgctgctggaggatttcaagggatacctcggctgtcaggctttgtctgaaatgatccagttctacttggaggaagtgatgccgcaagccgagaaccaggacccggatatcaaggcacacgtcaactcgctcggcgaaaacctgaaaacgctgcgcctgagactgagacgatgccatcggtttctcccttgcgaaaacaagtcaaaggctgtggaacaagttaaaaacgcctttaataagctgcaggagaagggaatctataaggccatgtcagagttcgacatttttatcaattacatcgaagcgtacatgactatgaaaatccgcaac

SEQ ID NO: 447 - DNA, 534 bp, Artificial Sequence
  Description of Artificial Sequence: Synthetic Transcript Sequence
atgcattcttccgcgctgctgtgctgtttggttctgttgacaggagtgcgggcgtcccctggccagggcacccaatctgaaaactcatgtacacattttcccgggaacttgccaaatatgctccgagacctgcgggacgccttttcccgggttaagaccttcttccagatgaaagatcagctagacaaccttctactgaaggagtctctactcgaggacttcaagggctacttgggctgtcaggccctgtcagagatgattcagttttacctggaggaggttatgccccaggcagaaaatcaggaccccgacatcaaagctcatgttaattcgttgggagagaacctgaagactttaaggctcaggctacggcgctgtcatcggttcctgccatgcgagaacaagtcgaaggccgtggagcaggtgaaaaatgcattcaataagctgcaggagaagggcatctacaaggctatgagcgagtttgacatcttcatcaactacatagaagcatacatgactatgaaaattcggaac

SEQ ID NO: 448 - DNA, 534 bp, Artificial Sequence; identical to SEQ ID NO: 433
  Description of Artificial Sequence: Synthetic Transcript Sequence

SEQ ID NO: 449 - DNA, 534 bp, Artificial Sequence
  Description of Artificial Sequence: Synthetic Transcript Sequence
atgcattcctccgctctgctgtgctgcctagtactcttgactggagttcgggcctccccaggacagggaacacagagtgaaaattcatgcacacacttccccgggaatctccctaatatgctgagggacctgcgggatgccttcagtcgcgtcaagactttctttcagatgaaagatcagctagataacctccttctaaaagaaagtctactagaagattttaaaggatacctggggtgccaggctctgtctgagatgatacagttttatctagaagaggtgatgccacaagctgaaaatcaggatccagatataaaagctcacgttaatagtctgggagaaaatcttaagactcttagactgcgcctcaggagatgccaccggttcctgccttgtgaaaacaaatccaaagccgtggagcaggttaagaatgccttcaacaaactgcaggaaaaagggatttataaagctatgtctgagtttgatatattcattaattacatcgaagcatatatgacaatgaagattcgaaac

SEQ ID NO: 450 - DNA, 534 bp, Artificial Sequence
  Description of Artificial Sequence: Synthetic Transcript Sequence
atgcattcgtccgcactgctttgttgtcttgtgctgcttactggcgtccgggcgagccctgggcaaggaacccaatcggaaaatagctgcacccattttcctggtaacttgccaaatatgcttcgcgatcttagggatgctttcagtcgagtcaagacttttttccaaatgaaggatcagctcgataatctgcttcttaaagagtcgctccttgaagatttcaagggttacctgggttgtcaggcactcagcgaaatgatacagttttatcttgaggaagtcatgcctcaggcggaaaaccaagatccagacattaaggcccatgtgaactcgctcggcgaaaacctgaaaaccctcagacttaggctgcggcgctgtcaccgatttctgccctgcgagaacaagtctaaggctgtggagcaagtgaaaaatgccttcaataaacttcaggaaaagggtatctacaaagctatgagcgaatttgacattttcattaactacatcgaagcatacatgacgatgaagattcggaat

SEQ ID NO: 451 - DNA, 534 bp, Artificial Sequence
  Description of Artificial Sequence: Synthetic Transcript Sequence
atgcactcatcagccctcctgtgctgcctcgtgctgctcaccggtgtgcgggcatctcctgggcagggaactcagagcgaaaactcctgtacccacttcccaggcaatctgccgaatatgctgcgcgatctgcgcgatgccttctcgcgggtgaaaaccttcttccagatgaaggaccaactggacaacctgttgctcaaggaatctctcctcgaagatttcaaaggttacctgggatgtcaggcactttcggaaatgatccagttttacctggaggaggtgatgccacaagccgaaaaccaagacccagatatcaaagcccatgtcaattccctcggggagaaccttaagaccctgcggctgcgattgcgcagatgccacaggttcctgccgtgcgagaacaagagcaaagcagtggaacaggtgaaaaatgccttcaacaagctccaggagaaaggaatctacaaggcgatgtccgagtttgatatcttcattaactatatcgaagcctacatgactatgaaaatcagaaac

SEQ ID NO: 452 - DNA, 534 bp, Artificial Sequence
  Description of Artificial Sequence: Synthetic Transcript Sequence
atgcatagttctgcccttctgtgctgtctggtgctgctgactggggtccgcgcaagtcctggccagggcactcagtcggaaaattcttgtacccatttccccgggaacttgccaaacatgctgagggacctccgggatgctttctcccgggtcaagacttttttccagatgaaggaccagctggacaacctgctacttaaggaatctctccttgaggactttaagggctatctcggatgtcaagcactgtctgaaatgattcaattctatctagaggaagttatgccacaagcagaaaaccaggatcccgatattaaggctcacgtgaactccttgggagagaatctgaaaacattgaggttgagactgagaaggtgtcatcgatttctcccatgcgagaacaaatcaaaggcggtggagcaggtgaagaatgctttcaataaactgcaggaaaaaggcatttataaggccatgagtgaattcgatatcttcattaattacatcgaggcctacatgacgatgaagatcaggaat

SEQ ID NO: 453 - DNA, 534 bp, Artificial Sequence
  Description of Artificial Sequence: Synthetic Transcript Sequence
atgcactcgtcagcactgctttgctgtctcgtgcttttgacgggagttcgtgcatccccaggccaagggactcaatccgagaattcctgtactcattttcctggaaacctgccaaacatgctccgggatctgcgggatgcgttcagcagggtcaagaccttctttcaaatgaaggatcagctggacaatcttctgcttaaggaatcgctgctcgaagatttcaaaggttacttgggatgtcaggcacttagcgaaatgatccaattctaccttgaagaagtgatgccccaagccgaaaaccaagatccagacattaaggcccacgtcaacagccttggcgagaatctgaaaaccttgcgtctcagacttcgcagatgtcatcgcttcctgccttgcgaaaacaagagcaaggcagtggagcaggtgaaaaatgcctttaacaaactccaagagaagggtatttacaaggcgatgtccgaatttgacatcttcataaactatattgaggcttatatgaccatgaagatccgcaat

SEQ ID NO: 454 - DNA, 534 bp, Artificial Sequence
  Description of Artificial Sequence: Synthetic Transcript Sequence
atgcacagttccgccctgctgtgctgtctcgtcctcctgacgggggtgagggcctctcctggccagggcacacagagcgagaattcctgcacgcacttccccgggaatctgcccaacatgttacgggatctgagagacgcattctcccgagtcaaaacatttttccagatgaaagaccagctcgacaacttactgctgaaggaaagcttgctggaggacttcaaggggtacctaggctgccaagctcttagtgagatgatccagttttatctggaggaggttatgccgcaggcggaaaaccaagatcccgacattaaagcacatgtaaattctttgggcgagaacttaaaaactctcagactgcgtttacgaagatgtcacagattcttgccgtgcgagaataaatccaaggcagttgagcaggtgaaaaacgcttttaataagttacaggagaaggggatctacaaggctatgagtgaattcgacatcttcatcaattacatcgaggcctatatgaccatgaagatcaggaac

SEQ ID NO: 455 - DNA, 534 bp, Artificial Sequence
  Description of Artificial Sequence: Synthetic Transcript Sequence
atgcatagctctgcgctcctgtgctgcttggtgctgctgaccggagttcgcgcctcccccggacagggtacccagtcagagaatagctgtactcacttcccgggcaaccttccaaacatgctccgtgacctgcgggatgccttctcgcgcgtcaaaacctttttccaaatgaaggaccaactcgacaacctgcttctgaaggaatctcttctggaggatttcaagggttacttggggtgccaagccttgagcgaaatgatccagttttacctggaagaagtgatgcctcaggcagaaaaccaagacccagacatcaaagctcatgtgaactcacttggagagaatctgaaaactctgcgcctgcggttgcgaaggtgtcacagattcttgccgtgcgagaacaaatcgaaagcagtcgagcaggtgaagaatgctttcaataagttgcaggaaaagggaatatacaaggctatgtccgagttcgatatcttcatcaactatatcgaagcctacatgacgatgaagattcgcaac

SEQ ID NO: 456 - DNA, 534 bp, Artificial Sequence
  Description of Artificial Sequence: Synthetic Transcript Sequence
atgcatagttccgccctcttgtgctgcctggtgctcctgaccggcgtgcgagcttcgccgggccaagggacccagagcgagaattcgtgcacgcacttccctggcaatcttcccaatatgcttagggacctccgagatgccttctcgcgcgtcaagaccttctttcagatgaaggatcaactggataatctgctgctgaaggagagcttgctcgaggacttcaaagggtacctcggttgtcaagcgctgagtgaaatgattcagttttacctggaggaggtcatgccacaagcagaaaatcaggaccccgatatcaaagcgcacgtcaacagtctgggagagaatcttaagacgctgcgcctgcgcttacgccgatgtcacagattccttccgtgcgaaaacaagtcgaaagctgtagaacaggtgaagaacgcattcaataagctgcaggaaaagggaatctataaggctatgtctgagtttgacattttcatcaactacatagaggcctatatgactatgaaaatccggaac

SEQ ID NO: 457 - DNA, 534 bp, Artificial Sequence
  Description of Artificial Sequence: Synthetic Transcript Sequence
atgcactcttcagccctcctgtgctgtctcgtgctcctcactggagttcgcgcgagcccaggacaaggtacacagtctgaaaattcttgtacccattttccagggaaccttcccaacatgctcagagacctgagagatgcatttagccgcgtgaagacctttttccaaatgaaggatcaactcgataacctgctgctgaaagaatccctcctcgaagattttaaaggttacctcggttgccaggcattgtccgaaatgatccaattctacctggaagaagtgatgccccaggctgagaaccaagatcctgatatcaaggcacatgttaactcgctgggcgagaacctaaagacattgaggctgcgcctgagacgctgccatcgttttctcccttgcgaaaacaagagcaaggccgtggagcaggtaaagaatgcttttaacaagctccaggaaaaaggtatttacaaagccatgagtgagttcgacatttttatcaattatatagaggcgtacatgactatgaaaatccggaac

SEQ ID NO: 458 - DNA, 534 bp, Artificial Sequence
  Description of Artificial Sequence: Synthetic Transcript Sequence
atgcattcctccgctctcctgtgctgccttgtgctgctgacaggagttcgggcatctccaggccagggaacacaaagtgaaaactcttgcacacacttcccaggcaaccttccaaacatgctgcgcgacttgcgggacgccttttcgcgggtgaagaccttcttccaaatgaaggaccagctcgacaacctgcttctaaaggagtccttgctcgaagactttaaggggtacctcgggtgtcaggctctttccgagatgatccagttctacttagaggaggttatgcctcaggctgaaaaccaggaccctgacattaaagctcatgtcaattcactgggagaaaatctcaagacactgcgactgcgtttgagaagatgtcaccggttcctgccttgtgaaaacaagagcaaagctgttgagcaggtcaagaatgcttttaacaaactgcaggagaaaggaatatacaaagcaatgtcagagttcgacatttttattaactatattgaagcgtatatgacaatgaagatacggaat

SEQ ID NO: 459 - DNA, 534 bp, Artificial Sequence
  Description of Artificial Sequence: Synthetic Transcript Sequence
atgcactccagtgctctgctgtgttgtttggtgctactaaccggcgttcgggcttctccagggcagggcacccaaagtgagaactcctgcacccatttccctggcaacctgcctaacatgctgagagacttgagagatgccttcagtagagtcaagactttcttccagatgaaggaccagctggacaatctgctgctcaaggaatcactgctcgaagatttcaagggctacttaggatgccaagctctgtccgagatgattcagttttatctcgaggaggtgatgccacaggccgaaaaccaagaccccgacataaaggcccacgtaaactctctaggtgaaaacttgaaaaccctgcgactccgccttcgccggtgccataggtttctgccttgcgaaaacaagagcaaggcagtggaacaagtcaagaacgcctttaacaaattgcaggagaagggaatttataaggccatgagcgagtttgacatctttatcaactacatcgaagcttacatgaccatgaaaattagaaat

SEQ ID NO: 460 - DNA, 534 bp, Artificial Sequence
  Description of Artificial Sequence: Synthetic Transcript Sequence
atgcacagcagcgcattgctgtgttgtctggtgctgctgaccggcgtcagggcgagcccaggtcaaggtactcagagcgagaacagctgtacccattttccgggcaacttgccaaatatgttgcgcgatctacgggacgcattttcacgtgttaaaactttttttcaaatgaaagaccaactcgacaacctgttgctcaaagagtctctgcttgaagactttaagggctatctgggttgccaagcgctgagcgagatgatccagttctatcttgaggaggtgatgccgcaagcagaaaaccaggacccggacatcaaagcccatgtgaatagcttaggtgagaacctgaagaccctgcgcttgcgcctgcgtcgctgccatcgattcctcccttgtgagaataagtctaaagcggtagagcaagtgaaaaacgcgtttaacaagctgcaggagaaaggtatttacaaagcgatgagtgaattcgatatcttcatcaactatattgaagcgtacatgaccatgaagatacgcaat

SEQ ID NO: 461 - DNA, 534 bp, Artificial Sequence
  Description of Artificial Sequence: Synthetic Transcript Sequence
atgcattcatcggcacttctttgttgtttggtgcttcttactggagtccgggccagccctggtcaaggaactcaaagtgagaactcgtgtacccattttccaggcaacctgccaaacatgctccgggatctgcgtgatgcattttcgcgcgtcaagacctttttccagatgaaggaccagcttgacaatcttctcctgaaggaatcgctgttggaggatttcaaaggctacttgggttgtcaggcactcagcgagatgatccaattctacctggaagaagtgatgccccaggcagagaatcaggatccagacattaaagcacacgttaactcgttgggggaaaatctcaagactcttcgccttcgtcttagaagatgccacagattccttccatgcgagaacaaatctaaagccgtggaacaagtgaagaatgcgttcaataagttgcaagaaaagggaatctacaaggcgatgtccgaatttgacatattcatcaactatatcgaagcatacatgactatgaagattcgcaat

SEQ ID NO: 462 - DNA, 534 bp, Artificial Sequence
  Description of Artificial Sequence: Synthetic Transcript Sequence
atgcattcttccgcccttctgtgctgtcttgtgctgctgaccggagttcgtgctagccctggccaggggacccagagcgagaactcatgcacccacttccctggcaatttgcctaatatgctccgagacctgcgtgatgcttttagtcgcgtgaaaactttttttcaaatgaaggaccagcttgacaacctgcttctcaaggaaagcctgctggaggacttcaagggatacctggggtgtcaggcgcttagcgaaatgattcaattctacctcgaggaagtaatgccgcaggcagagaaccaggatccagatattaaagctcacgtgaacagtctgggggagaatctgaagaccctacgcctgcgcctgcggagatgccaccgttttttgccctgtgagaacaagtccaaagctgtggagcaggtgaagaatgcctttaacaagcttcaggagaagggcatctataaggcaatgtcagaattcgacatcttcatcaattacatcgaggcctacatgaccatgaaaatcaggaac

SEQ ID NO: 463 - DNA, 534 bp, Artificial Sequence
  Description of Artificial Sequence: Synthetic Transcript Sequence
atgcattccagcgctttgttgtgctgcctcgttctcctgaccggagtccgtgcgagccccgggcaggggacccaaagtgagaattcctgtacccactttcctggcaacctccctaacatgctccgagacttacgcgatgccttctctcgggtaaagactttttttcaaatgaaagaccagctagacaatttacttcttaaggaaagcctgctcgaggacttcaaaggttaccttgggtgtcaggcgctatctgaaatgatccaattttacttggaggaagtcatgccccaggcggagaatcaggacccagatatcaaggctcacgtgaattccttgggggagaatcttaagaccctgcggctgcgcttgagaagatgtcatcggttcctgccttgcgagaacaagagtaaagctgtggagcaagtgaaaaatgccttcaacaaacttcaggagaagggaatctacaaagccatgagtgaattcgatatctttataaactatattgaggcatacatgacaatgaaaatcaggaat

SEQ ID NO: 464 - DNA, 534 bp, Artificial Sequence
  Description of Artificial Sequence: Synthetic Transcript Sequence
atgcatagcagcgctctgctctgctgcctggtgttgctgaccggcgtgagggcatctccggggcaagggacacagagcgagaattcttgtactcattttcccggcaatctgccaaacatgctccgagacctgcgcgatgcgttctctcgtgtcaagacttttttccaaatgaaagatcagttggacaatctccttttaaaagaatccctgctggaagattttaagggctacctggggtgccaagccctgtctgaaatgattcaattctatctggaagaggtaatgccacaggcggagaatcaggaccccgatatcaaagctcacgtgaactcccttggggaaaatctcaaaactctgcggctaaggttgcgacgttgccatcgcttcctgccctgcgaaaacaaaagtaaagccgtcgaacaggttaaaaacgcgtttaataagctgcaggagaagggtatctataaagccatgagcgaattcgacatttttattaactatatcgaggcgtatatgacgatgaaaatccgcaat

SEQ ID NO: 465 - DNA, 534 bp, Artificial Sequence
  Description of Artificial Sequence: Synthetic Transcript Sequence
atgcattctagcgctctcctctgttgcctagtgctgcttacgggagtgagagcgtctcctgggcagggcactcagtctgaaaatagctgtacccactttcccgggaaccttcctaatatgttgagggacctgcgggatgcattctctagggtgaagaccttcttccaaatgaaggaccagttagacaacttgctcttgaaagaatcccttcttgaagactttaaaggttaccttggctgccaggccctctccgagatgatacagttctatctggaagaagtgatgccccaggccgaaaatcaggatcccgacatcaaagctcacgttaacagcctgggtgaaaacttgaaaaccctgcgcctcaggctcagacgatgtcacagatttctgccctgtgagaacaagtctaaagccgttgagcaggtcaaaaatgcatttaacaaactccaggagaaaggaatttacaaggcaatgagcgaattcgacatttttatcaattacatcgaggcctatatgaccatgaagatacgcaac

SEQ ID NO: 466 - DNA, 534 bp, Artificial Sequence
  Description of Artificial Sequence: Synthetic Transcript Sequence
atgcattcaagcgcactcctgtgttgccttgtcctgctgacgggggtgagggcatcccccggtcagggcactcaatcggagaactcttgtacgcatttccccgggaatctcccaaacatgctgcgggacctcagagatgctttctcccgggtcaagaccttttttcaaatgaaggatcaactggataatctgctgttgaaagagtccctgcttgaggactttaagggatatcttggttgtcaggcactttcggagatgatccaattctaccttgaagaagtcatgccccaggcagagaaccaagatcctgacatcaaggcccatgtgaactcgcttggagagaatctcaagactctgcgcttgcgtctgagacgatgtcatcggttcctcccatgtgagaataagtcaaaggcagtggaacaagtgaagaacgcgtttaacaaacttcaggaaaagggaatttacaaggcaatgtcggagttcgacatcttcatcaactatattgaagcatacatgaccatgaagattagaaac

SEQ ID NO: 467 - DNA, 534 bp, Artificial Sequence
  Description of Artificial Sequence: Synthetic Transcript Sequence
atgcactcgtctgcacttctctgctgtttggtattactgaccggggttcgagcatcccccggacaggggacccagtccgagaactcatgcacacattttcctggtaacctgcccaacatgttacgcgacctgcgcgatgcgttttcaagggtgaagaccttcttccagatgaaggatcagttagacaacctgctcttgaaagaaagtttgctcgaagattttaagggatacctcggctgccaggccttgtcagaaatgattcagttttacctcgaagaggttatgccacaggccgagaaccaagatcccgacataaaagctcacgtaaactcgttaggggaaaacctgaaaacattgcggcttagactaaggagatgccatcggttcctgccatgcgagaacaagagcaaagcggtcgagcaagtcaagaacgcctttaataaacttcaagagaagggtatttataaagctatgagtgagtttgacatattcatcaattacatagaagcgtatatgacaatgaaaatcagaaac

SEQ ID NO: 468 - DNA, 534 bp, Artificial Sequence
  Description of Artificial Sequence: Synthetic Transcript Sequence
atgcactcaagcgcactcctttgttgcctcgtcctgctgacaggcgtgcgggcttctcccgggcaaggaacacagtctgaaaattcttgtacacactttccaggcaaccttccaaacatgttgagagatctgcgtgacgcttttagcagggtcaaaacttttttccagatgaaagatcagctggataaccttttgctaaaggagtccctactggaagactttaagggctatttaggatgtcaggcactgagtgagatgattcagttttacctggaggaagtgatgcctcaggctgagaatcaagatcccgatataaaggcacatgtaaacagtctcggcgagaacctgaagacactgcgtctgcggctgcggaggtgccatcggttcctaccatgcgaaaataagagtaaggctgtggagcaggtgaagaacgccttcaacaaattgcaggagaagggcatctataaagcgatgtctgaatttgatatctttatcaattatattgaagcttatatgacaatgaaaatacgcaat

SEQ ID NO: 469 - DNA, 534 bp, Artificial Sequence
  Description of Artificial Sequence: Synthetic Transcript Sequence
atgcattcttctgctttattatgttgtcttgttcttttgacgggagttcgagcatctccaggacaaggaactcaatctgaaaattcatgtacacattttccaggaaatctaccaaacatgttaagggaccttagagatgcatttagtcgagttaaaacattttttcaaatgaaagatcaattagataatttattattgaaagaatcattacttgaagactttaagggatatcttggttgtcaggctttatctgaaatgatacaattttatttagaagaagttatgccacaagctgaaaatcaggatccagatattaaagcacatgttaatagtttaggagagaatttaaaaacacttagattaagattaagaagatgtcatagatttttaccatgtgaaaataaatctaaagctgttgaacaagttaaaaatgcttttaataaattacaagaaaaaggaatttataaagctatgagtgaattcgatatctttatcaattatatagaagcatatatgacaatgaaaattagaaat

SEQ ID NO: 470 - DNA, 534 bp, Artificial Sequence
  Description of Artificial Sequence: Synthetic Transcript Sequence
atgcattcctcggcactgctttgttgtctcgtgctgctgactggggtccgcgcatcgccaggacagggaacgcagtccgaaaacagctgcacccattttcccggaaatctgccgaatatgcttagagatctgcgagatgctttttcccgcgttaagacttttttccagatgaaggaccaattggacaatcttttgcttaaagagtcgcttctggaggactttaaaggctacctgggatgtcaagccctttcagaaatgattcagttctatctggaagaggtgatgccccaggcagaaaaccaagatcctgatatcaaggcacatgtcaattccctgggtgaaaatctgaaaaccttgaggcttcggcttcggcggtgccacagatttcttccttgcgaaaacaagtcgaaggcggtggaacaggtgaaaaacgcgttcaataagctgcaggagaagggcatctacaaggcaatgtctgaattcgacattttcatcaattacatcgaggcctacatgaccatgaagattagaaac

SEQ ID NO: 471 - DNA, 534 bp, Artificial Sequence
  Description of Artificial Sequence: Synthetic Transcript Sequence
atgcattcatctgcccttctttgttgcctcgtgctactaacaggtgtgagagcctcgccaggtcaggggacacagtcagagaactcatgtacgcacttccctggtaacctgcctaacatgctgcgtgatctgcgggacgcttttagtagagttaaaacctttttccaaatgaaagatcagctggacaatttgctgctaaaagagagtctgttggaagactttaaaggctatctgggctgccaggcattgtccgagatgattcagttctatctggaggaagtgatgccgcaggccgaaaaccaggatccagatattaaagctcacgtgaatagtctgggtgagaatttaaaaaccctgcggctgagattgaggaggtgtcatcgatttcttccttgcgaaaataaatctaaggctgtggagcaggtcaagaatgcctttaacaagctgcaagaaaaggggatttacaaagctatgagcgagtttgacatttttatcaactacattgaggcctatatgactatgaaaattcgcaat

SEQ ID NO: 472 - DNA, 534 bp, Artificial Sequence
  Description of Artificial Sequence: Synthetic Transcript Sequence
atgcactcgagcgccctgctttgctgcctcgtgttgctcacaggggtgagagccagccctgggcaggggacccagagtgaaaattcctgtacgcacttccccgggaatctgcccaacatgctgcgggacttaagagatgcctttagtcgcgtcaagaccttcttccaaatgaaagatcagctggacaacctgctgcttaaagaatcactcctcgaagatttcaaagggtatctaggctgccaagccctgtcagagatgattcagttttatctcgaggaagtaatgcctcaggccgagaatcaggacccagatataaaagcgcacgtcaacagcctgggggagaacttgaaaactctgcgcttacgcctaagacgttgtcatcgcttccttccgtgcgagaacaaaagcaaagcagttgagcaggtaaagaacgcattcaacaagttgcaggagaagggcatctataaggcaatgtctgagtttgacatatttatcaactacatcgaggcatatatgaccatgaaaattcgcaac

SEQ ID NO: 473 - DNA, 534 bp, Artificial Sequence
  Description of Artificial Sequence: Synthetic Transcript Sequence
atgcattcatccgccctgctgtgctgcctggtccttctcacgggagtgcgggcttctcccggccaggggactcagtcagagaattcgtgcacccatttccctggaaacctgccgaacatgctgagggacttgcgcgacgccttttcaagagtgaaaacttttttccaaatgaaagaccaactggacaatctgttgctcaaagaatccctgttggaggacttcaagggatacttgggatgccaggcgctgtcagagatgatccagttttacctcgaagaggtgatgccacaggcggaaaaccaagacccagacatcaaggcacacgtcaatagcctgggggaaaatcttaagaccctgcgcctccgcctgcggcgctgccaccgctttctgccgtgcgaaaacaaatcaaaagctgtggagcaggtgaagaacgcctttaacaagctccaggaaaagggaatctacaaggccatgtcggaattcgacattttcatcaactatattgaggcgtatatgacgatgaaaatccggaac

SEQ ID NO: 474 - DNA, 534 bp, Artificial Sequence
  Description of Artificial Sequence: Synthetic Transcript Sequence
atgcactcaagtgccctgctgtgctgccttgtgctgctgaccggggtgcgcgctagccctggacaaggcacacaatccgagaacagctgcacacactttcccggtaatctgcccaacatgttaagagaccttagggatgctttttctcgcgtgaagaccttctttcagatgaaagaccagcttgacaatctgctgctgaaagagtctctcttggaagattttaaagggtaccttggttgccaggctctgtctgaaatgatccaattctacctggaggaggtgatgccccaggcggaaaatcaggatcccgacatcaaggcccacgtcaacagtttgggcgagaacctgaagacactgcggcttcgacttcgcagatgtcacagatttctgccgtgtgaaaacaagtcaaaagctgtggaacaggtcaagaacgcatttaacaagctgcaggagaagggtatttataaagctatgagtgagtttgacatctttataaactacatagaggcatacatgactatgaagattcgtaac

SEQ ID NO: 475 - DNA, 534 bp, Artificial Sequence
  Description of Artificial Sequence: Synthetic Transcript Sequence
atgcactcatctgcactgctgtgctgtctcgtcctgttgacaggcgttagagcgagcccaggacagggaactcagagcgagaattcatgcacacatttcccgggcaacctgccaaacatgctaagagacctgcgggatgccttctctagagttaagactttctttcagatgaaagatcagctggacaaccttttgcttaaggagagtttgctggaggacttcaaaggttatctaggctgtcaagccctctccgaaatgatccagttctatctggaagaggtgatgccacaggcagagaatcaggaccctgatattaaagcgcacgtcaactccttaggagaaaatctgaaaacactccgattgaggctgcgccggtgtcaccggtttctcccatgtgagaacaaatccaaggctgtggaacaagtgaaaaatgcctttaacaagctgcaagagaagggaatctacaaggccatgagcgagtttgacatttttattaattatatcgaggcgtatatgactatgaaaatccgtaat

SEQ ID NO: 476 - DNA, 534 bp, Artificial Sequence
  Description of Artificial Sequence: Synthetic Transcript Sequence
atgcattcctccgcccttctctgttgcttggtgctcctgactggagtcagggcatcgcctggtcagggcacccaatccgagaattcctgcactcattttcccggcaacctccctaacatgctgcgagatcttcgcgatgcattttcaagagtcaagaccttttttcagatgaaggatcagctcgataaccttctccttaaagaatccctgctggaggactttaagggttacctgggttgtcaggccctctcggaaatgatccagttttatctggaagaagtgatgcctcaagcagaaaaccaggatccagacataaaggcacacgtgaactctctgggcgagaatctgaaaacccttagattgcgccttagaaggtgtcatagattcctgccttgtgagaacaagtccaaagccgtggaacaggtcaagaacgcattcaacaaacttcaagaaaaaggaatctacaaggccatgtcggagtttgacattttcattaactacattgaagcatacatgaccatgaagatccgtaac

SEQ ID NO: 477 - DNA, 534 bp, Artificial Sequence
  Description of Artificial Sequence: Synthetic Transcript Sequence
atgcactcttccgctctgctgtgctgcctggtcttgctaacgggcgtacgggcctccccgggtcagggcacgcaatctgaaaattcgtgcacccatttccccggcaacctgcccaacatgctccgtgacctgcgtgacgctttttctcgggtgaagaccttcttccagatgaaggaccaattggacaacctcctgcttaaggaaagtctgttggaagatttcaaggggtatctgggatgccaggcactatctgagatgatacagttctacctcgaggaggttatgccgcaggcagagaaccaagaccccgacattaaagcccacgtcaactcgctgggagagaatctaaagacgctgcgcctccgcctgcgcaggtgccaccgattcctgccatgcgagaacaagtccaaggcggttgaacaggtgaaaaacgccttcaataaattgcaggagaaaggcatttacaaggccatgtccgagttcgatattttcatcaattatatcgaggcctatatgaccatgaagatcagaaat

SEQ ID NO: 478 - DNA, 534 bp, Artificial Sequence
  Description of Artificial Sequence: Synthetic Transcript Sequence
atgcactcttccgccttgctgtgctgccttgtgttactcacaggagtgcgggcatctcccgggcagggcactcagtccgagaacagctgtactcacttccctggcaatctccccaacatgctgagagacctgagggacgctttctcaagggtaaagaccttctttcagatgaaggatcagctggacaacctcctgctgaaggagagcctgctcgaggactttaaaggctacctgggctgccaggctctgtccgagatgattcagttctatttagaagaggttatgcctcaagcggagaatcaggacccagacatcaaagctcacgtcaacagtcttggcgagaatctgaagactctgagactccgcctgcgacggtgtcatcgcttcctgccatgcgaaaataagtcaaaggccgtcgaacaagtaaagaatgcctttaacaagctgcaggagaaaggcatctataaggcaatgtctgaattcgacatatttataaattatattgaggcctacatgacaatgaagatacgcaat

SEQ ID NO: 479 - DNA, 534 bp, Artificial Sequence
  Description of Artificial Sequence: Synthetic Transcript Sequence
atgcatagctcggcattgctctgttgcctcgtgctgctgaccggggtccgcgcgtcccctggtcaaggaactcaatccgaaaactcctgcactcattttcctggtaacctcccaaacatgctgagggatctgcgcgacgcattttccagggttaagacctttttccagatgaaggatcagctggataatctcctgctgaaggaatcgcttctggaggacttcaagggatacttgggttgccaggcactcagcgaaatgatccagttttacctcgaagaagtcatgccccaagctgagaaccaagaccccgatatcaaggcccatgtcaactcacttggagaaaacctcaagacccttagacttaggttgaggagatgtcacagatttctcccttgtgagaacaagtcaaaggcagtggagcaagtgaaaaatgcttttaacaaactccaagaaaaggggatttacaaagccatgagcgaatttgacattttcatcaattacatcgaagcctacatgactatgaaaatcaggaac

SEQ ID NO: 480 - DNA, 534 bp, Artificial Sequence
  Description of Artificial Sequence: Synthetic Transcript Sequence
atgcattccagtgccctgctctgctgccttgtcctcctgaccggtgtgcgggcgtcgccgggtcaagggacgcagagcgaaaactcctgtactcactttccgggtaatctgcctaatatgcttcgggacttgagggatgcgttctcccgtgtgaaaaccttctttcaaatgaaagatcaactcgataaccttctcctgaaggaatcattgctggaggatttcaagggatacctgggatgccaggcgctctccgaaatgattcagttctaccttgaagaggttatgccacaggcagaaaatcaagaccccgacatcaaggcccacgtgaattcgctgggagagaatttgaaaaccctgcgcctgcgactgagacgctgccatagattcctgccgtgtgagaacaaatcgaaggccgtggaacaggtgaaaaacgctttcaacaagctgcaggagaaagggatctataaggcgatgtcggaattcgacattttcatcaactacatcgaggcttacatgactatgaaaatccggaac

SEQ ID NO: 481 - DNA, 534 bp, Artificial Sequence
  Description of Artificial Sequence: Synthetic Transcript Sequence
atgcactcgtcggcgctcctttgctgtctcgttctgctgaccggagtgagagcgtcaccaggacagggcacccaatctgagaactcatgcactcacttcccgggaaatctccccaatatgctgcgcgatctgcgcgacgccttttcgcgcgtcaaaaccttcttccagatgaaggaccaactggataacctgcttttgaaggagtcgctgttggaggacttcaagggctacctgggatgtcaggccctcagcgagatgattcagttttatcttgaagaagtgatgcctcaggccgaaaaccaagaccccgatatcaaggcacatgtgaattcactgggcgaaaatctgaaaaccctcagactgcgactgcggcgctgccatcgctttcttccgtgcgagaacaagtcaaaggccgtggagcaagtcaagaacgccttcaataagctccaggaaaaaggaatttacaaagctatgtccgaattcgacatcttcataaactacatcgaagcatacatgactatgaaaatccggaac

SEQ ID NO: 482 - DNA, 534 bp, Artificial Sequence
  Description of Artificial Sequence: Synthetic Transcript Sequence
atgcatagttctgccctgctgtgttgtctagtgttgctgacaggagtgcgcgcttctcctggtcaaggcactcaatccgagaattcctgtactcattttcccggcaatctgcctaatatgcttcgggatctacgagacgctttctcgcgggttaagacgttcttccaaatgaaagatcaactagacaatctgctcctcaaggagtcgctgctggaagatttcaaggggtatctgggctgtcaggcacttagtgagatgatccagttctacctggaggaagtaatgccccaagcggaaaatcaggatcccgatatcaaggcacatgtgaacagcctaggagaaaacctcaaaaccctgcggttaagattgcgtcgctgtcacaggtttctaccgtgcgagaataagagtaaggccgtcgagcaagtgaaaaatgcctttaacaagctgcaggaaaaaggaatctataaagccatgtccgagtttgacatcttcatcaactacatcgaggcttatatgaccatgaagattcggaat

SEQ ID NO: 483 - DNA, 534 bp, Artificial Sequence
  Description of Artificial Sequence: Synthetic Transcript Sequence
atgcacagcagcgctctcctgtgctgtctggttctgctgaccggagtccgcgcatcgccaggtcaaggtactcaaagcgaaaactcttgcacccactttccgggaaacctgcctaacatgctgcgggatctgcgggatgctttctcccgagtaaagacgttcttccaaatgaaagatcagctggacaacctgctcctgaaagagtcgctgctggaggactttaagggatacctgggctgtcaggccctctccgaaatgatccagttctacctcgaagaggtgatgccgcaggccgaaaatcaagacccggacatcaaggcccacgtcaactcactgggagaaaacttgaaaactctgcggctccgcttgaggagatgccaccggtttctcccctgcgaaaacaagtccaaagcggtggagcaggtgaaaaacgccttcaacaagctccaggagaagggaatctacaaagcgatgtcggaattcgacatcttcatcaattacattgaggcctacatgactatgaaaatcaggaat

SEQ ID NO: 484 - DNA, 534 bp, Artificial Sequence
  Description of Artificial Sequence: Synthetic Transcript Sequence
atgcattcgtctgctttgttgtgttgtctcgtgttgctaaccggggtgagggcatcccctggacagggtacacagtcagagaattcctgcacacatttcccaggaaacctccctaatatgttaagggacctccgagatgctttcagtcgagtgaagaccttttttcaaatgaaagatcagcttgataatctgcttcttaaagaatctctcttggaagatttcaagggatacttgggatgtcaagctctttcagagatgattcagttctatttagaagaggtgatgccacaagcggagaatcaagatccagacattaaggcgcatgtaaactccttgggtgaaaatttaaagactctcaggcttagacttcgaaggtgtcatcgattccttccttgcgagaacaaatccaaagctgttgaacaggtcaagaatgctttcaacaagctccaagagaagggcatttataaggctatgtctgaattcgatatctttatcaactatatcgaagcttatatgacgatgaagattcggaat

SEQ ID NO: 485 - DNA, 534 bp, Artificial Sequence
  Description of Artificial Sequence: Synthetic Transcript Sequence
atgcattcgtcagctcttctttgttgcctggtgttgttgactggcgtgcgcgcatctccaggacaaggaactcagagcgagaactcatgtacccatttccccggtaatcttccaaatatgctgagagatctgcgtgacgcgttctcaagagtcaagaccttttttcaaatgaaggatcaacttgataacctcttgctgaaggaaagccttttggaagatttcaagggttacctggggtgccaggccttgtcagaaatgatccaattctacctggaggaagtcatgccacaagcggagaaccaggatccggacattaaggctcatgtcaactccctgggagaaaatcttaagactctcagactgcgcctgcggcgttgccacagatttctgccctgtgagaacaagtccaaggccgtggaacaagtgaaaaacgcgttcaataagctgcaggagaaggggatatacaaggcaatgtccgaatttgacattttcattaactacatagaagcatacatgactatgaagatccggaac

SEQ ID NO: 486 - DNA, 534 bp, Artificial Sequence
  Description of Artificial Sequence: Synthetic Transcript Sequence
atgcattctagcgctctgctctgctgtctcgtgctgttgactggagtccgcgcatccccaggacagggtacccagagcgaaaacagctgcacccacttcccaggaaatcttcccaacatgctgcgtgatctgcgcgatgctttttcccgcgtgaagacttttttccagatgaaggaccaactggataatttgctgcttaaggagtccctcctcgaggactttaagggttatctgggatgtcaagccctgagcgagatgattcagttttacctggaggaggttatgcctcaggctgagaatcaggacccagatatcaaggctcacgtaaattctcttggcgagaatctgaagactctgaggctcaggctcagaagatgtcaccgctttctcccttgcgagaacaaaagtaaggctgtagagcaagtcaaaaatgctttcaacaagttgcaggagaagggaatctacaaagccatgtctgaatttgatatttttattaactacattgaagcttacatgactatgaagataaggaat

SEQ ID NO: 487 - DNA, 534 bp, Artificial Sequence
  Description of Artificial Sequence: Synthetic Transcript Sequence
atgcattcttcagcgctgctgtgctgccttgtgctgctgaccggtgtgagagcctcccctggacagggaacacaaagtgagaattcatgtactcactttccaggaaatctgccgaacatgctgcgtgacttgcgcgatgcgttttctagagttaaaacctttttccagatgaaagatcaattggacaatctgctcctgaaggaatcacttctggaggactttaaagggtacctgggttgtcaagctttgtccgagatgatccagttttacctcgaggaagtgatgccacaagcagagaaccaggaccccgatattaaggctcacgttaacagtctgggggagaaccttaagaccctgcgtctgcgcctccggaggtgccaccggtttctgccatgcgagaacaaatcaaaggccgttgaacaggttaaaaacgcattcaataaactacaagaaaaggggatttacaaggccatgtccgaattcgacattttcatcaactatattgaggcatacatgactatgaagattcgcaat

SEQ ID NO: 488 - DNA, 534 bp, Artificial Sequence
  Description of Artificial Sequence: Synthetic Transcript Sequence
atgcattcctccgcgttgctgtgctgcctcgtgttgctcactggcgtgcgcgcgtcgcctggccagggtactcaaagcgaaaattcctgtactcactttccggggaacctcccgaacatgctgcgtgacctccgggacgccttcagccgcgtgaaaaccttcttccagatgaaggatcagttggacaacttgcttttgaaggagtcacttctggaagatttcaagggatacctgggatgccaagccctgtcagaaatgatccagttttacttggaggaagtgatgccacaggcggaaaatcaggatccggacatcaaagcccatgttaactcgctgggggagaatctcaaaactctgagacttcgcctgcggcggtgtcacagattcctgccatgcgagaacaagtcaaaggctgtcgagcaggtgaaaaacgcctttaacaagctgcaagaaaaggggatctacaaggcaatgtcggaattcgatatctttatcaattacatcgaagcatacatgaccatgaagattcggaac

SEQ ID NO: 489 - DNA, 534 bp, Artificial Sequence
  Description of Artificial Sequence: Synthetic Transcript Sequence
atgcactcatctgccctcctatgttgcttggtgcttcttactggagtacgagcaagccctgggcagggtactcagtccgagaactcatgcacccacttcccaggaaacctccctaacatgctgagagacctccgcgacgcattttcgagagtgaagactttttttcagatgaaggaccagctggacaacctcctactgaaggagtccctactggaagactttaagggctacctaggatgtcaggccctaagcgagatgatccagttctacctggaggaagttatgccacaggcagagaaccaagatccagacatcaaagcacacgtgaacagcctgggggaaaatcttaagaccctacggttgagactgcgcagatgtcaccgattcctcccttgtgaaaataagagcaaggccgtcgagcaggtcaagaacgcattcaataaactgcaggagaaagggatatataaagccatgagtgaattcgacatattcatcaactacatcgaggcttatatgaccatgaaaattagaaat

SEQ ID NO: 490 - DNA, 534 bp, Artificial Sequence
  Description of Artificial Sequence: Synthetic Transcript Sequence
atgcatagctcggccctgctgtgttgtctcgtcttgctcacgggcgtccgcgctagtcctggacaaggtactcaatctgagaattcgtgcacgcatttccccggtaatttgcctaacatgcttagggacctccgggatgcctttagcagggtgaagactttcttccagatgaaagaccaactcgacaatcttctgctaaaagaatctctgttggaagattttaaaggttacctgggttgccaggctttgtccgaaatgatacagttttacttagaggaagtcatgccccaggccgaaaaccaggaccccgatatcaaggcccacgtgaattcacttggcgagaacctgaagacgcttcgactgcgactgaggcgttgccatcgattccttccttgcgaaaacaagtcaaaggccgtggaacaggtcaagaatgcgtttaacaaactccaagagaaaggtatatataaagctatgtcggaatttgatattttcataaactacattgaagcttacatgacaatgaaaataagaaat

SEQ ID NO: 491 - DNA, 534 bp, Artificial Sequence
  Description of Artificial Sequence: Synthetic Transcript Sequence
atgcattcgtccgcactcctctgctgcctggtgctcctcactggtgtacgcgcaagccctggccaaggtacccagagcgagaactcctgcactcacttcccgggaaacctcccaaacatgttgcgcgatctgcgggacgctttctccagggtcaagacgttcttccaaatgaaggatcagctcgacaatttgctgctgaaggaatcactgctcgaggactttaagggctacttgggatgccaggctttgtcagagatgatacaattctatcttgaagaagtgatgccccaagcggagaatcaggacccagatatcaaggcccacgtcaacagcctgggagaaaatctgaaaaccctgcggctccgtttgcgcagatgtcatagattcctgccgtgtgaaaacaaatcgaaagcagttgaacaggtgaagaacgccttcaacaagttgcaggagaagggaatttacaaagcgatgtcagaatttgatatctttatcaactacatcgaggcatacatgactatgaaaatccggaat

SEQ ID NO: 492 - DNA, 534 bp, Artificial Sequence
  Description of Artificial Sequence: Synthetic Transcript Sequence
atgcattcatccgcactgctttgttgtcttgtgctgctcaccggtgtgagagcatcgccagggcagggtacccagtcggaaaactcatgcacccattttcctggaaaccttccaaacatgcttagagatttgcgggacgcattttcgagagttaagactttctttcagatgaaggaccagctggataaccttctgcttaaggaaagcctgctggaggatttcaagggttacctcggatgccaggccctctcggagatgattcagttctacctcgaagaagtcatgccgcaagccgaaaaccaagatcctgatatcaaggctcacgtgaattcgcttggagagaacctgaaaacgctgcggttgcgtttgcgccgctgtcatcggtttcttccatgcgagaataagtccaaggctgtcgaacaggtgaagaatgcattcaacaaactccaggagaaaggaatttacaaagcaatgtcggaatttgatatctttatcaactacattgaggcatacatgactatgaagatacggaac

SEQ ID NO: 493 - DNA, 534 bp, Artificial Sequence
  Description of Artificial Sequence: Synthetic Transcript Sequence
atgcactcctcggcactcctgtgctgcctggtcctgctcactggtgtccgcgcctcccctggtcaaggaactcagtcggagaattcctgcacccacttcccgggcaatctgccaaatatgctgcgcgacctgcgggatgccttcagcagagtcaagactttcttccagatgaaggaccagctggacaacctgcttctgaaggaatcactcctcgaagatttcaagggatacctcgggtgccaggccctgagcgagatgatccagttctacctggaagaagtcatgccgcaagctgagaaccaggacccagacattaaggctcatgtcaattcgcttggagagaacctcaagacgttgagactgcgtctgagacggtgccatcgcttcctgccgtgcgaaaacaagtcaaaggcggtggaacaggtgaagaacgctttcaacaagctgcaggagaaaggaatctacaaagcgatgagcgagtttgacattttcattaactacatcgaggcatacatgaccatgaagatccgcaac

SEQ ID NO: 494 - DNA, 534 bp, Artificial Sequence
  Description of Artificial Sequence: Synthetic Transcript Sequence
atgcattcctccgctctgctctgctgtcttgtgcttctgaccggagtgcgtgcctcacctgggcagggcacccaatccgagaactcttgcactcactttccgggaaacctgccaaacatgctgcgcgatctgcgggacgcgttctcgagagttaagactttctttcagatgaaggaccagcttgataatctgctcttgaaagagtcgctgctcgaagatttcaaaggatacctggggtgccaggcactgtcggaaatgatacagttctatttggaagaggtgatgccacaagccgagaaccaagatcctgacatcaaggcccatgtaaactcactgggtgaaaacctcaagacgctgcggctgcgattgcgccggtgtcacagattcctgccctgtgaaaacaaatcgaaggcagtcgaacaggtgaaaaatgctttcaataagctccaagagaaaggaatctacaaggctatgtcagaattcgacatcttcatcaattacattgaggcctacatgaccatgaagattcgcaac

SEQ ID NO: 495 - DNA, 534 bp, Artificial Sequence
  Description of Artificial Sequence: Synthetic Transcript Sequence
atgcatagctcggcattgctctgctgcctcgtgctcctcaccggagtcagagcatcaccgggacaaggtactcaatcggaaaactcatgtacccattttccaggcaatctgccaaatatgcttagggacctgagagatgccttttcccgcgtcaaaacgtttttccaaatgaaggatcaactggacaatctgctccttaaagagtccctcctcgaagatttcaagggttacctgggatgccaggccctctcggaaatgattcaattctacttggaagaagtgatgcctcaggcggaaaaccaggatccggatatcaaagcacacgtcaacagcctgggggaaaatcttaaaactttgcgcctgcgcctgcgtaggtgccatcggtttctgccgtgtgagaataagtccaaggcggttgaacaggtcaagaatgccttcaacaagctccaagaaaaaggcatctacaaggcaatgtcggagtttgacatcttcattaactacattgaagcgtacatgaccatgaagatccggaac

SEQ ID NO: 496 - DNA, 534 bp, Artificial Sequence
  Description of Artificial Sequence: Synthetic Transcript Sequence
atgcatagctccgctttgctgtgctgcctggttctgttgactggcgtgcgagccagccctgggcaaggaactcagtctgaaaacagctgtacccattttcctgggaacctgcccaatatgttaagggatctgcgtgacgccttcagccgcgttaagaccttttttcagatgaaggaccagctggacaatctcctgctgaaagagagtctgctggaagactttaaaggctacctgggctgccaggccctgtccgaaatgattcagttctacctggaggaagtgatgccccaagccgagaatcaggatcctgatatcaaggcgcacgtgaattccctaggcgaaaacctcaaaacgttgcggcttcgtttaagacgttgccaccggttcctgccctgtgagaataagtccaaagccgttgaacaggttaaaaacgccttcaacaagctgcaagagaaggggatctacaaagcaatgagtgaattcgatatctttataaattatatcgaagcatacatgaccatgaaaatcagaaat

SEQ ID NO: 497 - DNA, 534 bp, Artificial Sequence
  Description of Artificial Sequence: Synthetic Transcript Sequence
atgcattcctccgccctgctttgctgtctggtgttgctgacgggagtgagggcaagccctggccaagggacgcagtcggagaactcatgtactcattttcctggaaaccttcctaatatgctcagagatctgcgtgatgcattttcccgggtcaagaccttctttcaaatgaaagatcagctggataaccttctgcttaaggagtctttgctcgaagatttcaagggatatctcggttgtcaagcactcagcgaaatgattcaattctaccttgaagaagttatgccacaagcagaaaaccaggacccagatatcaaagcacatgttaactcgctgggtgaaaatctgaaaaccttgcgccttaggctccggcggtgtcatcggtttctcccttgcgaaaacaaatcaaaggccgtggagcaagtcaagaacgcgttcaataaactgcaggagaagggtatttacaaagccatgtccgagttcgacatcttcatcaattacattgaagcgtacatgaccatgaagatcaggaac

SEQ ID NO: 498 - DNA, 534 bp, Artificial Sequence
  Description of Artificial Sequence: Synthetic Transcript Sequence
atgcatagctccgctctgctttgttgtcttgtgctgttgacaggggtgagggcttcaccaggccagggtacacaaagtgagaacagttgcacgcatttccctggcaatttgcctaatatgctgagagatctgagagacgcattttctagagtgaagacattctttcagatgaaggatcagctcgacaacttgctgcttaaggagtcccttttagaagacttcaaaggttatctcgggtgccaggcccttagcgagatgattcagttttatttggaggaagtcatgccccaggccgagaatcaggatcctgatatcaaagcacatgtgaatagcctcggcgaaaatttgaaaacactaagactgcgactgagaagatgtcaccgatttcttccatgtgagaacaagtccaaagccgtggaacaagttaagaatgcattcaataagttgcaggaaaaggggatctacaaggccatgtcggaattcgacattttcatcaactatatagaagcctatatgacaatgaagatcagaaac

SEQ ID NO: 499 - DNA, 534 bp, Artificial Sequence
  Description of Artificial Sequence: Synthetic Transcript Sequence
atgcattcgtctgctctgctgtgctgccttgtccttctgacgggcgtccgagcttccccggggcagggcacccaaagcgagaattcctgcacgcactttccaggtaatcttcccaacatgttaagagatcttcgggatgcttttagcagggtgaaaacctttttccaaatgaaggatcagctggacaatttgctccttaaagaaagccttctcgaggacttcaaaggctatctggggtgtcaggccctgtcagaaatgatacagttctacctggaagaggtgatgccacaggccgagaaccaggaccctgacatcaaagctcatgtgaattccctgggcgagaacctgaagactctccgcttgcggctgaggcggtgccaccggtttctgccttgcgagaataagagtaaagctgtcgagcaagtcaaaaacgcattcaacaagctgcaggagaaaggcatttataaggccatgagtgaattcgacatttttattaactacatcgaagcttacatgacaatgaaaatacgaaac

SEQ ID NO: 500 - DNA, 534 bp, Artificial Sequence
  Description of Artificial Sequence: Synthetic Transcript Sequence
atgcactcctctgctctcttgtgctgcttagtcctcttaactggggtgcgagctagtccaggacagggaacacaatccgagaactcctgcacacacttcccaggcaatcttcccaacatgctcagggacttgcgggacgccttcagccgggtgaagaccttctttcagatgaaggaccagttagacaatttattactcaaggagtcactccttgaagatttcaaaggctacttaggctgccaggccctgagtgaaatgatccaattttacctggaggaggtaatgccacaggcagaaaaccaagacccggacattaaagcacatgtaaactcccttggcgagaatctgaagacactgcgattacggctgaggaggtgtcacaggttcctgccctgcgagaacaaaagcaaggccgtggagcaggtcaaaaacgcatttaataaacttcaggagaagggaatttataaggcaatgtccgaattcgacatttttattaattacatcgaagcttacatgaccatgaaaatccgcaac

SEQ ID NO: 501 - DNA, 534 bp, Artificial Sequence
  Description of Artificial Sequence: Synthetic Transcript Sequence
atgcactcttcagctctgctgtgctgccttgtactgctgactggagtacgcgctagccctggccaaggaacacaatccgagaattcttgcacacacttcccaggcaaccttccaaacatgcttcgcgatctgcgcgacgcctttagtcgcgtgaaaaccttcttccaaatgaaggaccagctcgacaacctgcttttgaaggagtccctgctcgaggattttaagggatatctgggatgtcaagccctctcagagatgatccaattttacttggaggaagtaatgccccaagccgaaaaccaagacccggacatcaaagcccacgtcaattcactcggcgaaaatctcaagacattgagactgcgcctgcgcagatgccaccgctttctgccctgcgaaaataagtcaaaagcggtagaacaggtaaagaacgccttcaacaagctgcaggagaaaggcatatacaaggccatgtctgagttcgatatcttcattaactacatcgaagcctacatgactatgaagatccgcaac

SEQ ID NO: 502 - DNA, 534 bp, Artificial Sequence
  Description of Artificial Sequence: Synthetic Transcript Sequence
atgcattcgtcagcccttctttgttgtctcgttcttctcacgggagtgagagcttcgccaggccaaggtacgcaaagcgaaaattcctgcactcactttcctggtaaccttcctaatatgttgcgtgaccttagggacgccttctcgcgggtgaaaacttttttccagatgaaagaccaactggacaaccttctgttgaaggaatcgctgcttgaggatttcaagggatatcttgggtgtcaggccctgagcgaaatgatccagttttacctcgaagaggtgatgcctcaagcagaaaatcaagatccagacattaaggcacacgtcaactcactcggtgaaaaccttaagaccttgcgccttcggctgcgacgctgtcatagatttcttccttgtgagaataagtccaaggcagtcgagcaggtgaagaacgcgtttaacaaactccaggagaaaggaatctacaaagccatgagcgaatttgatatcttcatcaattacattgaggcatacatgaccatgaaaatcagaaac

SEQ ID NO: 503 - DNA, 534 bp, Artificial Sequence
  Description of Artificial Sequence: Synthetic Transcript Sequence
atgcactcgagcgcactgctgtgttgcctggtccttctcacgggcgtcagggcctccccgggacagggtacccagtcagagaattcctgcactcatttcccgggtaatctgcctaacatgctgcgggacctcagagatgcgtttagccgcgtcaagaccttcttccaaatgaaggaccaattggataacctgctgttgaaggaatccctcctggaggacttcaaaggttacctgggatgccaggctctctcggagatgatccagttttacctggaggaagtgatgccacaagcagaaaatcaagatccagacatcaaagcccacgtgaatagtctgggagagaacctgaaaacgctgcggctcagattgagacgctgccaccggttcctgccgtgtgaaaacaagtcgaaggcagttgagcaggttaagaacgccttcaacaagctgcaggaaaaaggcatatacaaggcgatgtctgaattcgatatctttatcaactatatcgaggcgtacatgaccatgaagattcggaat

SEQ ID NO: 504 - DNA, 534 bp, Artificial Sequence
  Description of Artificial Sequence: Synthetic Transcript Sequence
atgcattcctccgccctcctgtgctgcctcgtcttgctcaccggcgtgcgggcatcacctggtcaaggaacgcagtccgaaaacagctgtacccactttcccgggaatctcccgaacatgttgagggacctgagagacgccttctctcgggttaagacgttcttccagatgaaggaccagctggataatctgctgctcaaggagtcgctgctcgaagatttcaaagggtacttggggtgccaggcactgtccgaaatgattcagttctacttggaagaggtgatgcctcaagcggaaaaccaggacccagatatcaaggcgcatgtgaactcgctgggagaaaacctgaaaaccctcagactcaggctgagacggtgccatcggttcctcccgtgcgaaaacaagtcgaaagccgtggaacaggtgaagaatgccttcaacaaacttcaggaaaagggtatctacaaagccatgtcggagttcgatatctttatcaattacatcgaggcctacatgaccatgaaaatccgcaat

SEQ ID NO: 505 - DNA, 534 bp, Artificial Sequence
  Description of Artificial Sequence: Synthetic Transcript Sequence
atgcactcctccgcactcttgtgctgtctggtgctgcttacgggcgtcagagcatcgcctgggcaaggtactcagtccgagaattcgtgtacgcattttcccggcaatctgcccaacatgcttcgtgacctgcgcgatgcattctcaagggtgaaaaccttttttcaaatgaaggatcaactcgacaatctgctgctgaaggagtccctccttgaggacttcaagggatacttgggctgtcaagcccttagcgaaatgatccagttctacctcgaagaggtgatgcctcaagcagagaatcaggatccagacataaaggctcatgtgaattcgcttggagaaaatctcaaaaccctgaggcttagattgcggaggtgtcatcgatttttgccatgcgaaaacaagagcaaggctgtggagcaagtgaagaatgcatttaacaagctgcaggaaaagggtatctacaaggcaatgtccgaattcgatatcttcatcaattacatcgaagcgtacatgactatgaagattaggaac

SEQ ID NO: 506 - DNA, 534 bp, Artificial Sequence
  Description of Artificial Sequence: Synthetic Transcript Sequence
atgcattcatccgctctcctgtgttgcttggtgctgctgaccggagtgagggcgtccccgggtcagggaacccaatcagaaaacagttgcacccacttcccgggcaatctgccaaatatgctgcgggatctgagagacgcattctcacgtgtcaagactttcttccaaatgaaagatcagttggataacctgctccttaaagaatcactgctcgaggacttcaagggatacttgggatgccaagcgctgtcagagatgatccagttttacctggaggaggtcatgccgcaggcggagaaccaggaccccgatatcaaggcccacgtgaacagcctgggtgagaatttgaaaactctgcggctccgcctgagaagatgccatcgatttctcccatgcgaaaacaagtcgaaggcagtggagcaggtcaaaaatgcctttaacaagctgcaagaaaagggaatctacaaggccatgagcgagttcgatatcttcatcaattacattgaagcgtacatgactatgaagatccgcaac

SEQ ID NO: 507 - DNA, 534 bp, Artificial Sequence
  Description of Artificial Sequence: Synthetic Transcript Sequence
atgcacagttcagcccttctgtgctgtctggtactcctgactggcgtccgggccagcccaggccaagggactcagagcgagaattcctgtacccattttcctggtaacctgcctaatatgttgcgggacctccgagacgcattcagtcgggttaagacattcttccagatgaaagatcagctggacaacctactgctgaaggaatccttactagaggactttaaaggctacctcggctgtcaggccctctcagagatgatccagttttatctcgaggaggtgatgccacaggccgaaaatcaggacccagatattaaggcacacgtgaactccctgggggagaatctgaagacactgcgactacgtctgaggagatgtcaccgctttctgccttgtgaaaataagtctaaagcagtggaacaagtgaaaaacgcttttaacaagctgcaggagaagggcatttataaagctatgagcgagtttgacattttcatcaactatattgaagcttacatgactatgaagattcggaat

SEQ ID NO: 508 - DNA, 534 bp, Artificial Sequence
  Description of Artificial Sequence: Synthetic Transcript Sequence
atgcactcgtcggcactcctgtgttgccttgtgctgctgactggcgtgagagcctctccaggacagggaactcaatcggagaactcgtgtacccacttcccggggaacctcccgaacatgttgcgcgacctccgggacgctttctcccgcgtcaagacgttcttccaaatgaaggatcagctggacaacctcctgctcaaggagagccttcttgaagatttcaagggttacctcggatgccaggccctgtcggagatgatccagttctacctggaggaagtgatgccgcaagccgagaatcaggatccagatatcaaggcccatgtgaactcacttggagagaatctgaaaactctgaggcttcggctgaggagatgccaccgcttcctcccgtgcgagaataagtcaaaggccgtggagcaggtcaaaaatgccttcaataagctccaagaaaagggaatctataaggctatgtccgaattcgacatcttcatcaactacattgaggcttacatgactatgaagatccgaaat

SEQ ID NO: 509 - DNA, 534 bp, Artificial Sequence
  Description of Artificial Sequence: Synthetic Transcript Sequence
atgcacagctccgccctgctgtgttgcctcgtgctgttgaccggagttagggcctcaccaggccaagggacccaatctgaaaatagctgcactcattttcccggcaatctgcccaacatgctaagggacctaagagatgccttctctcgggtgaaaacctttttccagatgaaggaccaactggacaatttgctgcttaaagaatctctcctcgaagactttaaggggtacctggggtgtcaagccctgtctgaaatgatccagttttatcttgaggaggttatgccacaggctgagaaccaagatcctgatatcaaggcccatgtgaacagcctgggagaaaacctgaaaaccctcaggcttcgattacgacgctgccaccgcttcctgccatgtgaaaacaagagtaaggctgtggagcaagttaagaatgccttcaacaaattacaggagaagggcatctacaaggcgatgtccgagtttgatatttttatcaattacatcgaggcctatatgacaatgaagattcggaac

SEQ ID NO: 510 - DNA, 534 bp, Artificial Sequence
  Description of Artificial Sequence: Synthetic Transcript Sequence
atgcacagctccgctctgctgtgctgcctcgttctcctgactggagtgagggcgagtcccggccaggggacgcagtcagaaaactcctgcactcacttcccaggtaatctgccaaacatgctgagagatcttagagacgctttctccagggtcaaaacctttttccagatgaaggatcaactcgataatctgcttctgaaagaatctctccttgaggacttcaaaggataccttggctgccaggcactgtctgagatgatacaattttatctggaggaagtgatgcctcaggctgagaatcaggatcccgacatcaaggcgcacgtgaactccttgggcgaaaatctgaaaacactgagactcaggcttcgaagatgccacagattcttgccctgtgagaataaaagtaaagctgtggagcaagtgaagaacgcctttaataagcttcaagaaaaggggatttacaaggctatgagcgaattcgatatcttcattaattacatcgaggcctatatgactatgaagatccggaat

SEQ ID NO: 511 - DNA, 534 bp, Artificial Sequence
  Description of Artificial Sequence: Synthetic Transcript Sequence
atgcactcgtcggcgctgctgtgctgcctggtgctccttactggagtgcgcgcatcccccggccaaggaactcagagtgagaactcctgcactcacttcccgggcaacctcccgaacatgctgcgggatctgcgggacgccttctcacgcgtaaagaccttcttccaaatgaaggaccagctggacaatctgctcctcaaggaatcactcctggaagatttcaaggggtacctgggctgccaggcgctttcggagatgatccagttctacctcgaggaggtcatgccgcaggcggaaaaccaggatcctgacataaaagctcacgtcaatagcctcggagaaaacctcaagacgctccgactgcggctgcgaagatgtcaccgcttcctgccgtgtgagaacaaatcgaaggcagtggaacaagtcaagaatgccttcaacaagctccaagagaaaggcatttacaaagccatgagcgaatttgatatctttatcaactatatcgaggcttacatgaccatgaagatccgcaat

SEQ ID NO: 512 - DNA, 1170 bp, Artificial Sequence
  Description of Artificial Sequence: Synthetic Transcript Sequence
atgcccccttccggactgcggctactccctctgcttctcccactgttgtggctacttgtgctcaccccaggtcgcccagctgcggggctgtcaacgtgcaagacaattgatatggagcttgtcaaaagaaaacgcatcgaggcaatcagggggcagatccttagtaaacttaggcttgcctctcccccgtctcagggagaggtccctccaggacccctccccgaagccgttctggctctgtacaattcaaccagggacagggtcgcaggagagtccgctgaacctgaaccagaacccgaagccgactattatgctaaagaagtgacccgggtgttgatggtggagacacacaatgagatctatgacaagtttaagcagtctacccactcaatttatatgttctttaacaccagcgaactacgcgaggcagtacccgagcccgtgctcctgtcgagggccgaactgaggctcctcagacttaagttgaaggtagaacagcatgtggaactgtaccaaaagtatagcaacaatagctggagatatctgagtaacagactgctcgctccttcagactcaccagagtggttgtccttcgacgttaccggagtagtccggcagtggctgtcccgggggggagagattgagggttttaggctgtcagcacattgttcttgcgactccagagacaataccctgcaggtggatattaatggctttacaactggccggagaggtgacctcgctactatccatggcatgaatcgcccctttctgctccttatggccacccccttggagagagcccagcacctacagtctagccgtcacaggcgcgccctcgacaccaactattgtttctccagcactgaaaaaaattgctgtgttaggcagctctacatcgattttcgcaaagatttgggctggaaatggatccatgagccaaagggatatcatgccaatttctgcctgggcccatgtccttacatctggtccttggatactcagtactctaaggttcttgcactttataaccagcacaatccaggcgcctctgccgcaccgtgttgtgtcccccaggccttagagcccctccccattgtatattacgtgggtcgaaaaccaaaggtagagcagctctcaaacatgattgtgaggtcctgtaaatgtagc

SEQ ID NO: 513 - DNA, 1170 bp, Artificial Sequence
  Description of Artificial Sequence: Synthetic Transcript Sequence
atgccaccttccggcctgcggctgcttcctctgctgctcccattattgtggcttctcgtgctgactccggggcggcctgccgcaggcctgtccacatgcaaaaccatagacatggaactagtgaagcgaaagcgtattgaagctatacggggccagatcctttccaaactccgtcttgcgtccccgccctctcaaggtgaggttcctcctggcccactgcccgaggccgttttagctctatataactccaccagggaccgcgtagcgggggaatcagccgaaccagaaccggagcccgaggctgattactatgccaaagaagtgaccagagtgctgatggtggagacgcacaatgaaatctacgacaaattcaaacagtcgacccactctatatacatgttctttaatactagcgagctgcgagaagccgtgcctgagcccgtgctgctttcaagggcggagctgcgtctcctgaggctgaagctgaaagtggagcaacacgttgaactttaccagaaatacagcaacaactcctggaggtacttgtctaatcgtctcctggcaccaagcgattccccagaatggttgtcattcgacgtgaccggggtagtgcgacagtggctgtcaaggggcggcgagattgaggggtttcgtctctccgcacattgttcttgtgacagtagggataatacgctgcaggtcgacataaacggcttcacaacaggcaggcgaggtgatctggctacaattcacggcatgaataggccattcctgctccttatggctacaccactagaacgtgcccagcacctccaaagctcacgccatcggagagcactcgataccaactactgcttttcgtctacggaaaaaaactgttgcgttcgccagctctacattgattttcggaaagacttgggttggaagtggattcatgaacctaaagggtaccatgcaaacttctgcctgggcccttgcccctacatttggagcctggatacacaatacagtaaggtgctggccctctacaatcaacataatcccggagctagcgcagcaccttgttgtgtcccgcaggctttagagccattgcccatcgtgtactatgtgggcagaaagcccaaggttgaacagctctccaatatgatagtccggtcttgcaagtgttca

SEQ ID NO: 514 - DNA, 1170 bp, Artificial Sequence
  Description of Artificial Sequence: Synthetic Transcript Sequence
atgccaccgtccggactccgcttgctcccgctgctcctgccactgctgtggctgctcgtgttgaccccgggcaggccagcggcgggactgtcaacctgcaaaactatcgatatggaattggtgaagagaaaacgcatcgaggccatcaggggacaaattctgtccaagctgcggttggcctccccgccaagccaaggagaagtgcccccaggtccactgcccgaggccgtgctcgccctgtacaacagcactcgcgaccgcgtggcaggagagtccgcagaaccggagccagaaccggaagcagattactacgcgaaagaagtgactagagtcctgatggtggaaactcacaacgagatctacgataagttcaagcagtcaacgcacagcatctacatgttcttcaatacctccgaactccgagaagccgtcccggaacccgtcctgctctccagagccgaacttcgcctcctgcgcctgaagctgaaggtggagcagcacgtggagctctatcagaagtactcaaacaattcgtggaggtacctgtccaacaggctgctggccccgtcggactcccctgaatggctcagtttcgacgtgaccggagtcgtgaggcagtggttgagccgcggaggagaaatcgaaggattcagactgtcggcacactgttcctgtgactctcgcgacaacaccctgcaagtggatatcaacggatttaccaccggccgccgcggggatctggcaactatccatgggatgaaccgcccattcctgctgctgatggcaacccctcttgaacgcgcccagcatctccagtcgtcccggcaccggcgcgcgctggacaccaactactgtttcagctcgactgaaaagaattgttgcgtcagacagctgtacatcgatttcagaaaggatctcggctggaaatggatccacgagccgaagggataccacgctaacttttgtcttggcccgtgtccgtacatctggtccctggacactcagtattccaaggtgctggccctctataaccaacataatccaggagccagcgctgcgccatgctgcgtcccacaggcactggaaccgctgccgattgtgtactacgtgggaaggaaaccaaaggtcgagcagctctctaacatgatcgtgcggtcatgcaaatgctcg

SEQ ID NO: 515 - DNA, 1170 bp, Artificial Sequence
  Description of Artificial Sequence: Synthetic Transcript Sequence
atgccgccctcaggcctcaggctgttgccactgctgctgcccttgctctggcttcttgtgctcacccctggaagaccagccgccggactgtcgacatgcaagacaattgatatggagctggtgaaacggaagagaatcgaagctataaggggacaaatcctttcaaaactcaggttggcctctccaccctcccagggggaggttccaccgggacctctgcctgaggctgtgctggccctatacaacagcacaagggacagagttgctggcgaatctgctgaacccgagcccgaaccagaagctgattattatgctaaagaagttacccgagtgctgatggtggaaacacataacgaaatttatgacaaattcaagcagagtacccacagcatttacatgttctttaacactagcgagcttagggaagccgtacctgagcctgtgctcttgtcgagagctgaactccgtctgctgcgacttaaacttaaagtggagcagcacgtcgagctgtatcaaaagtactctaataacagttggagatacctctctaacagactgctagcacccagcgactcacctgaatggctcagttttgacgtgacaggcgtggtccgccagtggctcagtaggggaggagaaatcgaaggatttaggctgagcgcccactgctcgtgcgacagtagagataacaccttgcaggtcgacataaacggtttcactaccggaagaaggggggacctcgccacaatccatggaatgaaccggcccttccttctcctgatggccacaccgctcgagagagcccaacatctgcagtcaagccggcataggagggcgctggacactaactactgttttagcagtacagaaaaaaattgttgtgtccgtcaactctatatagattttcgcaaggatctcggatggaaatggatccacgagcccaagggatatcacgctaacttctgcctggggccgtgcccctatatttggagcttggatactcaatatagcaaagtactggctctgtacaatcaacacaatcccggagcttccgctgctccgtgctgcgtaccccaggccctcgagccactacccattgtatactatgttggtagaaaacctaaagtggaacaactgagcaatatgatcgtacgcagttgcaagtgctca

SEQ ID NO: 516 - DNA, 1170 bp, Artificial Sequence
  Description of Artificial Sequence: Synthetic Transcript Sequence
atgccgccatccggacttaggctgctgcctctgcttcttccgctgctgtggctgttggtactgactccgggccggcctgcggcgggtctgtcgacgtgcaaaaccatcgacatggagctggtcaaacggaaacgcatagaagcaattcggggtcagatcctgagcaagctcagactggcttcgcccccctcccagggtgaagtgcctccgggaccgcttcctgaagctgtgctcgctttgtacaatagcacccgggacagggtcgctggagagtcggccgagcccgagccagagccagaggccgactactacgcgaaagaagtcacccgagtgcttatggtggaaactcacaatgagatctacgataagtttaagcaaagcactcattcgatatacatgttcttcaatacttccgagctcagggaagctgtcccagaaccagtgttgttgtcacgggctgaactgcggctgctgcgcctgaagctcaaagtggaacagcatgtcgaactgtaccagaagtattcaaacaacagctggcgctacctgtctaaccgactgctggcccccagcgactccccggagtggctgagctttgacgtgactggagtggtccgtcaatggcttagccgcggcggagaaatcgaagggtttagattgtccgcccactgttcatgcgactcaagagataacaccctgcaggtcgacattaatggcttcaccaccgggcggcgcggagatctggcaactattcacggcatgaaccgcccgtttctgcttctgatggccacgcctctggagcgggcgcaacatctgcaatcaagtagacaccgccgggccctggacaccaactattgcttctcgtccaccgagaagaactgttgtgtcagacagctgtacatcgattttcgcaaggatctcggttggaagtggatccacgaaccaaagggctaccatgctaatttctgcctcggaccgtgcccgtacatctggtccctggacacgcagtacagcaaggtgctcgccctgtacaaccaacataatcctggtgcaagcgccgccccgtgctgcgtgccgcaggctctggagccgctgccgatcgtttactacgttggacgcaaaccgaaggtggaacagctctcaaatatgatcgtccggtcctgcaagtgctcg

SEQ ID NO: 517 - DNA, 1170 bp, Artificial Sequence
  Description of Artificial Sequence: Synthetic Transcript Sequence
atgccaccgtccggcctccgccttctgcctttgctcctgcccttgctgtggctgcttgtgttgacgcccggcagacctgcggcgggcctttcaacctgtaagactattgacatggaactggtgaagcgcaaaagaatcgaagcaatcagaggacagattctttccaagctgcgacttgcctcacctccatcacagggggaggtcccaccaggacctctgccagaagcagtgctggccctgtacaattcaacgcgtgaccgtgtggcgggggagagcgccgagcctgaacctgaacccgaggcggactactacgcaaaagaggtgactagagtgctcatggtcgaaactcataacgagatttacgacaagtttaagcagtccacccatagcatctacatgtttttcaatacttcagagctccgggaagctgtgccagaaccagtgttgctttcgcgtgcagagcttcggcttctgcgcctgaagttgaaggtcgagcaacacgtggaactgtaccaaaagtactcaaacaattcgtggcgatacctttcgaaccggttgcttgcaccttcggatagtccagagtggctctcatttgatgtgaccggagtcgtcagacagtggctctcgcggggtggagaaattgaaggttttcggctctcggcacattgttcctgtgactccagggataatactctgcaagtggacattaacggatttacgactggacgcaggggcgatctggcaacgattcacggaatgaatcggccatttcttcttttgatggcaaccccacttgagcgagcacaacatctgcagtcgtcgcgtcatcgccgggctcttgataccaattactgcttttcgtcgaccgaaaagaactgttgtgtcaggcaattgtacattgactttcggaaagatcttggttggaaatggatccatgaacctaaagggtaccacgcaaatttctgtctgggtccttgtccatacatttggtccctggatacccagtattcaaaggtgcttgccctttacaaccagcacaatccgggggcctccgctgcgccatgttgcgtgccccaagcacttgagccccttccgattgtctactacgtgggaagaaagccaaaggttgagcaacttagcaacatgattgtgaggtcctgcaaatgttcg

SEQ ID NO: 518 - DNA, 1170 bp, Artificial Sequence
  Description of Artificial Sequence: Synthetic Transcript Sequence
atgcctccatccgggctcagactcctaccactgttgcttccattgttatggctcctcgttttgactcctggaagacctgccgctggactttctacatgcaaaacaattgatatggaattagtgaaacgtaaacgcatcgaagcaatccgggggcagatactctccaagctgcgcctcgccagtcctccctctcagggggaggtgccaccaggaccactccctgaagccgtgctcgctctatacaactcaactcgggatagggttgctggggaatcagctgaacctgaaccagaacccgaagcggattattatgcaaaagaagttactcgggtgctcatggtagaaacacataatgaaatctatgataaattcaaacagtctacacattctatatatatgttcttcaatacatccgaacttagagaagctgtgcccgagcccgtactcctctcacgagctgaactccggctcttacgcctcaaactgaaggtagaacagcatgtagaactttatcagaaatattcaaacaactcttggaggtatctttcaaataggttgctcgcacctagtgattcaccagagtggctgtcgtttgatgtgacaggagttgtgcgacagtggctctcaagagggggagaaatagagggatttcggctgagtgcacattgttcgtgtgatagtagggataatacactccaggtagatatcaatgggttcacaactgggcggcgcggggatcttgcaacaatacacggaatgaatcggccttttcttttattaatggccactccattagaacgcgcccagcacctgcagagttcccggcacagacgtgccctggatacaaactactgcttttctagtactgaaaaaaactgttgtgttcggcagctttatatagattttaggaaggatcttggatggaagtggatccacgagcctaaaggatatcacgcaaatttttgcctagggccctgcccttatatatggagtcttgacactcagtacagtaaagtgctcgctctctacaatcagcacaacccaggagcttcagcagccccctgctgtgtccctcaggcattagaaccgctacctatagtgtattatgtggggcggaaacctaaggtagagcagctctccaatatgatcgtgcgaagttgcaaatgttcc

SEQ ID NO: 519 - DNA, 1170 bp, Artificial Sequence
  Description of Artificial Sequence: Synthetic Transcript Sequence
atgccgccatccggactgcggctgctcccactgcttctcccccttctgtggcttcttgtgttgactcctggacgcccggccgccgggctctcgacctgcaagacgatcgatatggagctggtgaaacggaagcgtatcgaggcgatcagaggacaaatcctctcgaaactgagattggcttcccctccatcccagggagaagtgccgcctggaccactgcctgaagccgtgcttgctctctacaattcgactagagatcgggtcgctggagaatcagcagaacctgaaccggaaccggaagccgactactacgctaaggaggtaaccagagtgttgatggtggagactcataacgaaatctacgataagttcaagcaaagcacccacagcatttacatgttcttcaacacctccgagctccgcgaggcagtccccgagcctgtgctcttgagcagagctgagctgcgtctgttgaggctgaagctgaaggtggagcaacatgtcgaactctaccaaaagtactcgaataattcatggcggtacctctcaaacagattgctggctccgtctgactcgccggaatggctctcgttcgatgttactggagtggttagacagtggttgtcacggggcggagaaatcgaaggatttcgcctgtcggcccactgtagctgcgatagtcgggacaatacccttcaggtggacatcaacggattcaccaccggccggagaggggacctggccacgatccacggaatgaacaggccattcctgcttctcatggcgacccccttggagcgcgcccaacaccttcagtcctcacgacacaggagagcactcgataccaactactgcttttcaagcactgagaagaactgctgcgtgcgccagttgtatatagacttccgcaaggacctcggctggaagtggatccatgaaccaaaaggataccatgctaatttctgcttgggcccctgtccatatatctggtccctggatactcaatacagcaaagtgctggccctgtacaaccagcacaacccgggagcctcagccgccccatgttgtgtcccacaagcgctcgaaccactgccgatcgtgtattacgtggggcgcaaaccgaaggtggaacagctctcgaatatgatcgtgcgatcctgcaagtgctca

SEQ ID NO: 520 - DNA, 1170 bp, Artificial Sequence
  Description of Artificial Sequence: Synthetic Transcript Sequence
atgccgcccagcggactaaggttactgccattgctcttgcctcttctttggcttttggttctgaccccaggacgacccgccgccggcctcagcacttgtaaaaccattgacatggaactggtcaaacgtaagcggatcgaggccataagggggcagattttgtccaagctcaggctagcatcacccccatcacagggcgaggtgccacctggtccactgccagaagctgtgctggcactctataattcaactagagatagggtggctggcgagtccgccgagccagaacccgagcccgaggctgactattacgccaaagaagtcactcgggtcctgatggtagagacccataatgaaatctatgataagttcaaacagagcacacactccatatacatgtttttcaacacttccgaactgcgcgaagccgtaccagagcccgtccttttatcaagggccgagctgcgtctgttaaggctgaaactcaaggtcgaacaacacgtcgagctgtatcagaagtattctaacaattcctggaggtacctgagtaatagattgctcgctccctccgattcccccgaatggctgtcgttcgacgtgaccggagtggtccggcagtggctttcgagggggggcgaaattgaaggctttcgcttgagcgcacattgctcctgcgatagccgggataatacactgcaggtggatataaatgggttcaccacaggcaggaggggagacttggctaccattcatgggatgaatagaccattcttactgcttatggcgacccccttggagagggcacaacacctgcaaagttcaaggcacaggcgtgcactagatactaattactgtttcagctcaacagagaagaattgctgcgtgcggcagttatatatcgattttaggaaggacctgggatggaaatggattcacgaaccaaagggttaccacgccaacttttgtctcgggccgtgtccctacatttggtcccttgatacccaatattcaaaagtgttggctctctacaaccagcataaccccggcgcctccgcagccccctgctgcgtacctcaggctcttgaacctttgcctatcgtgtattacgtaggccgaaaacccaaagtagagcagctctccaacatgatcgtgaggagttgtaagtgtagc

SEQ ID NO: 521 - DNA, 1170 bp, Artificial Sequence
  Description of Artificial Sequence: Synthetic Transcript Sequence
atgcctccaagtggccttagactccttccgctacttctgccactgctgtggctgctggttctgacacctggcagacctgccgctggcttgagcacatgcaagacaatcgatatggaactagtcaagcgcaaacggattgaggctatccgggggcaaattctttccaaactgagacttgcaagcccaccatctcagggcgaggttcctccagggcctctgcccgaggccgttttagccctgtacaactcaaccagggaccgcgtcgccggagagagcgccgaacctgaacctgagcccgaagccgattactatgctaaagaagtcaccagagtactgatggtcgagacccacaacgagatatacgataagttcaaacagtctacacatagcatctacatgttcttcaacacttctgagctgagagaggctgtgcccgaaccagttctgctcagccgcgcagagttacggctgttacggctgaagctgaaagtcgaacagcacgtcgagctataccagaaatacagtaataattcatggcggtatttgtctaaccgcttacttgcccccagcgactcccccgaatggctatccttcgacgttaccggcgtcgtgaggcagtggctaagtcgcggaggggagattgaggggttccggctgtccgcccactgctcttgtgattcccgcgacaatactctgcaggtggacatcaacggatttacaaccggccgccgaggcgacctggctaccatccacggcatgaacagacctttcctgctgcttatggccacacccctggaacgggcacaacacttgcagtcctccaggcaccgccgggccctcgataccaattactgcttctcttctacagagaaaaattgttgcgtgcgccagctatatattgacttcagaaaggacctgggatggaagtggattcacgaacctaaaggctaccacgcaaatttttgcctgggtccttgcccctacatttggtctctggatacacagtacagcaaagttcttgccctgtacaaccagcataatcccggcgcaagcgccgccccttgttgcgttcctcaggctctcgaaccacttcccatcgtgtattatgtcggccgcaaacctaaagttgagcaactcagcaacatgattgtcaggagttgcaagtgttct

SEQ ID NO: 522 - DNA, 1170 bp, Artificial Sequence
  Description of Artificial Sequence: Synthetic Transcript Sequence
atgccgccgagcggtctgcgccttctgcctttgctgttaccactgttatggctcctggtgctgacgccgggtcgccccgctgctggtctaagcacctgcaagacaatagacatggaactggtgaagcgcaaacgcattgaggcgattcgcggccaaatactgtctaagctgagattggcttctcctccgagccaaggtgaagtccctccgggcccactgcctgaagcagtattggcgctgtacaacagcacacgtgatcgtgtcgctggtgaatccgcagagccggaaccggaacctgaggcagattattatgcaaaagaagttacgcgcgtgctgatggtggagacgcacaatgagatatatgataaattcaaacagtccactcatagcatctacatgttctttaatacgagcgagttgcgcgaggcagtgccggagccggtccttctttcccgcgcagagctgcgtctgttacgcctgaaactcaaggtggaacaacacgtggaactgtatcaaaaatatagcaacaatagttggcgctatctgagcaacagactgttagcgccttctgattctccggaatggctgagcttcgacgttactggtgttgttcgccagtggctgagccgcggtggggagatagaagggtttcgcctgtctgcacattgtagttgtgacagcagagacaataccctgcaggtagacatcaacggtttcactaccgggcgcagaggtgatctggccaccattcatggcatgaatcgcccttttctgttgctgatggcaactccgctggagcgcgcccagcacttgcaaagcagccgccaccgtcgcgcgcttgatacgaattattgctttagctctacggagaaaaattgttgtgtgaggcagttatacattgacttccgtaaagatctgggctggaagtggatccatgaaccaaagggctaccatgctaatttctgtctggggccatgtccgtacatttggagcctcgacacacagtactctaaagttcttgcgctgtataaccaacacaatcctggtgcgtctgcagcgccatgttgtgtcccgcaagcgctggagccactgccaatagtgtactacgttggtaggaagcctaaagttgagcagctgtcgaacatgattgtgcgcagctgtaaatgcagc

SEQ ID NO: 523 - DNA, 1170 bp, Artificial Sequence
  Description of Artificial Sequence: Synthetic Transcript Sequence
atgcccccctccggtttaagattgctgccactcttactgccactgctgtggttgttggtcttgacaccaggaaggccagcagcaggcttgagtacttgcaagaccatcgacatggagctcgtgaagagaaagcgcattgaagccatccggggacaaatcctgtcgaaacttcgcttggcttcgcccccaagtcaaggtgaggtgcccccagggccactgcctgaggccgtgctggctttgtacaactctacgagagacagggtggctggcgaatcagctgaaccagaaccagagccggaggccgattactacgccaaagaggtaacgcgggtcttgatggttgagacacacaacgagatatacgacaagtttaagcaatccactcatagtatatatatgttctttaatacatccgagctgcgagaagccgtcccagagcccgtgctcttgtcacgggccgaactgaggctcctgagattgaaactaaaagtcgagcagcatgttgagctctaccaaaagtactctaacaactcatggcgatatctctcgaacaggctcctggcccctagtgattcccccgaatggctgtcatttgacgtgaccggagtagttagacagtggctgagcagaggcggggagatcgaggggtttaggttatccgctcactgcagctgcgattctagagataacacattgcaagttgacatcaacggcttcactaccgggcgccggggtgatctcgcgaccatccatggaatgaacagaccatttctactactgatggctacaccattggaacgtgctcagcacctacagagttcacgtcataggagggcacttgacacgaattactgctttagctcaaccgaaaagaattgctgcgtgcgccagctatatatcgacttccggaaggatctgggatggaagtggatccacgagcccaaagggtaccacgctaacttttgccttggcccatgcccctatatttggtctttggatacccagtatagtaaggtcctggccctctataaccaacataacccaggggcatcggctgcgccatgttgcgtcccacaggccctcgagccgctgccaatagtttactacgtgggcaggaagcctaaggtggagcagctgtctaacatgattgtgcgttcctgtaaatgctca

SEQ ID NO: 524 - DNA, 1170 bp, Artificial Sequence
  Description of Artificial Sequence: Synthetic Transcript Sequence
atgcccccgtccggactgcgcttgctcccgctgcttctgccactgttgtggttgctggtgctgacgccagggcggccagccgcaggcctttccacctgtaagactatcgatatggagctggtgaaacgcaaacggatcgaagcaatccggggacaaatcctgagcaaactgaggctcgctagccctccatcccagggtgaagtcccaccggggccgcttcccgaagcagtgcttgcactctacaattctactcgggacagagtggctggagaatcggcggaacccgagccagagccagaagcagactactacgcaaaagaggtcaccagggtgctgatggtggaaactcataacgagatctacgataagttcaagcagtccactcactccatttacatgttcttcaatacttccgaattgcgcgaagcggtcccagaacctgtgttgctgtcccgcgcagagctgagacttttgaggcttaagctgaaagtggaacaacatgtggagctttaccaaaagtactcaaacaattcctggcggtatctctccaatcgcctcttggcccccagcgattcgcctgaatggctttcgttcgatgtgaccggagtcgtccggcaatggctgtcacgtggaggggaaatagaggggtttaggcttagcgcacattgttcgtgtgattcacgggacaataccctgcaggtggatatcaacggattcaccacgggaaggagaggggatctcgcgaccatccatggcatgaatcgtccttttctgctccttatggcaactcctcttgaacgcgcgcagcaccttcagtcatcacgacatagaagagcccttgacacgaactactgcttttcgtcgaccgagaaaaactgctgtgtccgccaactgtacatcgactttcggaaggatcttgggtggaaatggattcatgaacctaagggttaccatgcaaatttctgtctgggaccgtgtccatacatctggtcgctcgatacccaatactccaaagttcttgccctgtacaaccaacacaacccaggagcctcagcagccccttgctgcgtgccacaagcacttgaacccctcccaattgtgtattacgtgggacgcaagcctaaggttgagcaactctcgaatatgattgtccggtcgtgtaagtgttcc

SEQ ID NO: 525 - DNA, 1170 bp, Artificial Sequence
  Description of Artificial Sequence: Synthetic Transcript Sequence
atgcctccatcggggctcagactgcttccactgcttctccctctgctttggctcctcgtgctgaccccagggcgtcccgcagcaggactgtcgacgtgtaagaccattgatatggaactcgttaaaaggaaaaggattgaggcaatccgcggtcaaattctctcgaagctgcggctggcgtcgcctccctcgcaaggagaagtgcctcctggacctctccctgaagccgttctcgcactttacaactccactcgggaccgcgtggccggggaatctgccgagcccgaacccgaacctgaagcagattactatgcaaaggaagtcactagagttcttatggtcgagacgcacaacgagatttacgacaagtttaagcagtccactcattccatatacatgtttttcaatacctccgagcttcgggaagccgtgccagagcccgtgcttctgagccgcgcagagttgcgccttctcagactgaagctgaaagtggagcagcacgtggaactgtaccaaaagtattccaataactcatggaggtatctctcaaatcgactcctggctcccagcgattcacccgaatggctttcctttgacgtaaccggcgtcgtcaggcagtggctgtcacgtgggggtgagatagaaggattccgcctgtccgctcactgttcctgtgacagccgtgataacactcttcaggtcgatatcaatggattcaccaccgggcggcggggtgatcttgcaaccattcacggaatgaatagacctttcctgcttctgatggcgacccctcttgaacgggcccaacatctgcagagctccaggcatagacgcgcccttgataccaactactgcttttcatccactgaaaagaattgttgtgtgcgccaactgtacatcgatttccgaaaggatctcggttggaagtggattcatgaaccaaaggggtaccatgcaaacttctgtcttggtccatgtccatacatatggtctttggacacccaatactcaaaggtgcttgccctctataaccaacataaccccggagcatcagcggccccatgttgtgtgccacaggccctggaaccccttcctatcgtgtactacgtgggtcgaaaaccaaaggtcgagcagctgtcgaatatgattgtgcgttcatgtaagtgttcc

SEQ ID NO: 526 - DNA, 1170 bp, Artificial Sequence
  Description of Artificial Sequence: Synthetic Transcript Sequence
atgccgccgtcagggctgcgcctgctgcccctgctgctgccgttgctctggctgctcgttctgacgccgggacgacctgccgccggactctcaacttgcaagactatcgacatggaattggtcaagagaaagagaatcgaagccattagaggacagatcctctctaagctgcggctcgcctctcccccgagccaaggagaagttccaccggggccgctgcccgaagccgtcctggctctgtacaacagtacccgcgatcgcgtggctggggaatccgcagagccagaacccgagccggaagctgactactacgcgaaggaagtgactcgggttctgatggtggaaactcacaacgagatctacgataagttcaaacagagcacccactccatctacatgttcttcaatacttcggagctgagggaggctgtgccagagcctgtgctgctgtccagggcggagttgcggctccttagactgaagctgaaagtcgaacaacacgtggagttgtaccagaagtacagcaataactcctggcggtacctgagcaatagactgctcgcgccgtccgactccccagaatggctcagctttgatgtgactggagtggtgagacagtggctgagccgcgggggcgagatcgagggattcaggctttctgcgcactgttcatgcgactcgcgcgacaatactctgcaagtcgacataaacggatttaccactggcagacggggagatctcgccaccatccacggaatgaatcgcccgttcctcctcctgatggcgaccccgctggagcgcgcacagcacttgcagagctcacgccacagaagggcgctggacaccaattactgcttctcgtcaaccgagaaaaactgctgcgtcaggcaactgtacatcgatttcagaaaagatctcggatggaagtggatccacgaacccaaaggctaccacgctaacttctgcctcggaccatgcccgtacatctggtccctcgacactcaatactcgaaggtcttggccctctacaaccagcataatccgggagcgtcagcggcaccatgttgcgtcccacaggctctcgaaccgctgcccatcgtgtactatgtggggcgcaagcctaaagtggaacaactctcaaacatgatcgtgcggtcctgcaaatgtagc

SEQ ID NO: 527 - DNA, 1170 bp, Artificial Sequence
  Description of Artificial Sequence: Synthetic Transcript Sequence
atgccgccatcaggactgagactgctgcctctcctgctgcctctgctgtggttgctcgtgctcactccaggacgcccagccgcgggactgtcaacttgcaagactatcgacatggagcttgtgaagagaaagcgcatcgaagctatccgcggacaaatcctcagcaagctgcggctggctagccccccatcgcagggtgaagtgccaccgggaccactgcccgaagccgtgctggcgctgtacaactccacgcgggatcgcgtggccggagagtccgccgaaccagaacccgagcccgaagcagactactacgctaaggaagtgacgcgggtcctcatggtcgagactcacaacgagatctacgacaaattcaaacaatccacccactcgatctacatgttctttaacacgagcgaactgagggaagccgtgcctgagccagtgctgctgagccgcgcggagctcagactccttcgcctcaaattgaaggtcgagcagcatgtggaactgtaccagaagtactcaaataactcgtggcggtacctgagcaaccggctgttggccccttctgattccccggagtggctgtcctttgacgtgactggagtggtccggcagtggctgtcccggggaggcgagattgaaggcttccggcttagcgcgcactgctcgtgcgactcaagggataacactctgcaggtcgatatcaacgggttcactaccggccgccggggcgatctggcaacgattcacggcatgaatagaccgttcctccttcttatggccactcctctggagagagcccagcatctgcagtcaagccggcatcgcagggctctggacactaattactgctttagttccactgaaaagaattgctgcgtgcgccaactgtacatagatttcaggaaggacctcggttggaaatggatccatgagccaaagggataccacgcaaacttctgcctggggccttgcccgtacatctggtcgctcgacacccagtactcaaaagtcctggcgctctacaaccagcacaatcctggagcctcggcagcgccgtgttgcgtcccacaggccctggagcctctcccgatcgtgtactacgtaggacgcaaaccgaaggtggagcaactgagcaatatgattgtgcgctcctgcaagtgctcg

SEQ ID NO: 528 - DNA, 1170 bp, Artificial Sequence
  Description of Artificial Sequence: Synthetic Transcript Sequence
atgccgccgtcgggacttcgcctccttcctctcctgctgccactgctgtggcttctggtcctcactccaggaaggccggccgctggcctgtcgacttgcaagactatcgatatggaactggtcaagcgcaagcggatcgaagcaatccgaggacagatcttgagcaagctgcgcctggcctcgcccccgtcgcagggtgaagtgcctcctggtccgctgccggaggcggtcctggcactctacaactccacgcgcgaccgggtcgctggagagtcagccgaaccggaacccgaaccagaggccgattactacgcgaaggaagtaacccgcgtcctcatggtggagactcacaacgagatctacgataagttcaaacagagcactcattcaatctacatgttcttcaacacctccgaattgcgggaggctgtgccagaacccgtgctgctgtcaagggcagaacttaggctgctccgccttaaactcaaggtggaacaacacgtggagctgtaccagaagtacagcaataactcgtggcggtacctgtccaacagactcctcgcaccgtccgattcgcctgaatggctgtcctttgacgtgaccggagtggtgcggcaatggctctctcggggaggggagatcgagggattccggctgtcggctcactgcagctgtgacagccgcgacaataccctccaagtggacatcaacggcttcaccactgggcgcagaggggacctggccaccattcatggaatgaacagaccgttcctgctcctgatggccacccctttggaaagagcgcagcacctgcagagctcacggcaccgccgcgccctggataccaattactgcttttcctcgactgagaaaaactgttgcgtgagacagctgtatatcgacttcagaaaagatttgggctggaagtggattcacgaacccaagggttaccatgcgaacttttgtctcggaccgtgcccgtacatctggtcactcgacacgcagtactcgaaagtcctcgcactgtataatcaacataatccaggcgcgtccgcggccccatgctgcgtccctcaagccctggagccgttgccgatcgtgtactacgtgggccgtaagccaaaggttgagcagctttcaaatatgattgtgaggagctgcaaatgctcc

SEQ ID NO: 529 - DNA, 1170 bp, Artificial Sequence
  Description of Artificial Sequence: Synthetic Transcript Sequence
atgcctcccagtggactccggctgcttcctctcctgctgcctttgctctggttgctggtgcttacgcccgggagacccgctgccggactttctacctgcaagactatcgatatggagctggtgaaaagaaagcgcatcgaggccatccgaggacagatcctgagcaagctcaggttggcctcacctccaagccagggtgaagtgcccccaggcccactccccgaagcagtgctggctttgtataacagcacacgggatcgcgttgcaggcgagtctgcagagccagaacccgaaccggaggcagattactacgcaaaagaggtgacaagagtcctgatggtcgagactcataacgagatctacgataaattcaaacaaagcacccacagtatctatatgtttttcaacacaagcgagctccgcgaagccgtgcccgaacctgtcctgctcagcagagctgagctgcgacttctgcgactcaagctgaaggtcgagcagcacgttgaactctaccagaaatacagtaataacagctggcgctacctcagcaacaggctgttggctcctagcgactcccccgagtggcttagctttgatgtcaccggagtggtccggcagtggctttctcgaggtggagagattgagggcttccgcctgagcgcacactgcagctgcgatagccgcgacaacacacttcaggtggatatcaacggttttaccaccggaaggcggggggatctggcaacaattcatggcatgaatcgccccttcctcttgctcatggcaacccccctggagcgggcccagcatctgcaaagctcccggcaccggcgggccctggatactaattattgcttctcttcaactgagaaaaattgctgtgtgcgccaactctacattgatttccggaaggaccttgggtggaagtggattcacgagcctaaagggtaccacgccaatttttgcctgggcccctgcccttacatttggagtctggatacacagtattccaaagtgttggctctgtataatcagcacaatcccggtgcctcagctgcgccctgttgtgttccacaggccctcgaaccactgcctatcgtatactacgtggggcggaaacccaaggtggaacagctgtctaacatgatagtcaggagctgtaagtgctcc

SEQ ID NO: 530 - DNA, 1170 bp, Artificial Sequence
  Description of Artificial Sequence: Synthetic Transcript Sequence
atgccgccgtcgggcctgcggctcttgccactgctcctcccgctgctctggctcctcgtgctcaccccggggcgtccagctgcaggactctcaacctgtaagactatcgatatggagctggttaagcgcaaacgcatcgaagccattcgcggccaaatcctctccaagctgcggctggcgagcccgccatcgcaaggagaagtgcctccgggaccgctgccagaagcagtcctggccctgtacaactcaactcgcgaccgcgtggcgggcgagtccgccgagccagagcccgaaccggaagctgactactacgcgaaggaggtgaccagagtcctgatggtggaaacccacaacgagatctatgacaagttcaagcaatcgacgcactcgatctacatgtttttcaacacctccgaattgcgagaagccgtcccagagcccgttctcctgagccgggcagagctgcggcttctgagactgaaactgaaggtcgagcagcatgtggaactctatcagaaatactccaataactcctggagatacctgtcgaaccggctcctcgcacctagcgattcccctgaatggctgtctttcgacgtcacgggcgtggtccgccagtggttgtcccgcggaggagaaatcgaaggattccgcctgtcagcccattgtagctgtgactcgcgcgacaacaccctccaggtagacattaatggattcactactggacgccgcggcgacctggccactatccatggcatgaacagaccgttcctgctgttgatggcaactccactggaaagagcccagcacctgcagtcgagccggcaccggcgcgccctggatactaattactgcttctcgtcgaccgagaaaaactgttgcgtccgccaactgtacatcgatttccggaaggatctgggttggaaatggatccacgagccaaaaggctatcatgccaacttttgtctgggaccatgtccttacatctggtccttggacacccaatactcgaaggtgctggcgctctacaaccagcataatccaggcgccagcgccgccccctgctgcgtcccccaggccctcgaaccacttcctatcgtctattacgtcgggcggaagcctaaggtggagcaactgagtaatatgatcgtcagaagctgcaagtgttcg

SEQ ID NO: 531 - DNA, 1170 bp, Artificial Sequence
  Description of Artificial Sequence: Synthetic Transcript Sequence
atgccaccatccggtctcaggctcctcccccttctgcttccactgctgtggctactggtccttacaccaggtcgacccgcggcaggcctgtcgacatgcaagactatcgatatggagttggttaagaggaagagaattgaggctattagaggacagattctttctaagttgaggctcgcctcacctccctcccagggggaagtgccgcccgggcctcttcccgaggccgtgctcgccttgtacaacagtaccagagatcgggtggctggcgaatccgccgagcccgagcctgagccggaggccgactattacgctaaagaagtcacccgagttctcatggtcgaaactcataatgaaatatatgacaagttcaagcaatcaactcattcaatctacatgttcttcaatacgtctgagctgcgggaggccgtgcctgaaccagtgctgttgtcccgtgccgaactgcgcctgctcaggcttaaacttaaggtcgagcagcatgtggaactgtaccagaagtattcgaacaattcctggcggtatctgtcaaatcgtttgctggccccgtcagactctcccgagtggctgtcatttgatgtgactggtgtggtgcgacaatggttgtctaggggcggggagattgaaggcttcagactcagcgcccactgttcctgtgacagtagggacaacaccctccaagttgacataaatggattcactacaggacgccgtggggacttagcaactatccacggcatgaaccgaccttttctgttgctgatggctactcccctggaacgagctcagcatttacaatcctctagacaccgccgcgccctggacactaattactgtttcagcagtactgaaaagaattgttgcgtgcggcaactctacatcgactttcgcaaggacctagggtggaagtggatccacgagccgaaagggtaccacgctaatttctgcctcggcccatgtccttacatttggtccctggatacgcagtattcaaaggtactcgccctgtataatcagcataaccctggggcctcagccgccccttgctgtgtgccccaggccctggagccacttccgatcgtttattacgttggccggaagccaaaggtggaacagctctcaaacatgatcgtgcgatcttgtaaatgttcc

SEQ ID NO: 532 - DNA, 1170 bp, Artificial Sequence
  Description of Artificial Sequence: Synthetic Transcript Sequence
atgccacccagtggcctgcgtttgctgccgctccttctccctctgctctggctcctggttctgaccccaggcagacccgccgctggcctgtctacttgcaagacaattgacatggaactcgttaagaggaaacgtattgaggccattcgtggacagattctatcaaaactccgtctggcctcccccccgagtcagggggaggtaccaccgggaccactgccagaagctgttctcgccctctataatagtaccagggatcgtgtagccggagagtccgcagagcctgagcccgaacccgaggccgattactacgcgaaagaagtgacacgggtgctaatggtcgaaactcacaacgagatatacgataagtttaagcaatctacacacagcatttatatgttcttcaatacctcagagctgagagaggccgtacctgaaccagtgcttctgagcagggcggagctgaggttgctgcgcctgaaactcaaagtcgagcagcatgttgagctctaccagaagtactccaataactcttggcggtatttgtctaatagacttttggcacctagcgactctccggagtggctatcatttgacgtgacaggcgtggtgagacagtggctaagccgcggcggggaaatcgagggatttaggctatcagcccactgcagttgcgactcacgcgacaatactctgcaggtggacataaacgggtttaccaccggaaggcgcggcgatttagcaactattcacggcatgaaccggcctttcctcctgctgatggctacccctctcgaacgcgctcagcatcttcaatcgagcaggcaccgccgagcactcgatacaaattattgtttctcctctacagaaaaaaattgttgtgtccggcagctatacatagatttccggaaggatctggggtggaagtggattcacgagccaaaaggctaccatgccaatttttgtctagggccttgcccttatatatggtccctcgacacccagtattccaaagtgttggccctctataatcagcataacccaggtgccagcgccgcgccctgttgtgtcccgcaggctctcgaacctcttcccattgtgtactacgtgggcaggaagccgaaagtagagcagctttcaaacatgatagtgcgatcctgtaaatgctcc

SEQ ID NO: 533 - DNA, 1170 bp, Artificial Sequence
  Description of Artificial Sequence: Synthetic Transcript Sequence
atgccgccatctggcctgagactccttcctctgctcttgccgttgctgtggctgttggtgctgacccctgggcgacccgccgctggcctctccacatgcaagaccattgacatggagctcgttaagagaaagaggatcgaggccattcgtggccaaatactctcaaaattgagactggcgtcaccccctagtcagggtgaagtgccccctggccccctacctgaggccgtgctggctctgtacaatagcaccagagaccgcgtggccggcgagagtgctgagcccgaacccgaaccggaagctgactactacgccaaagaggtaacgcgtgttctgatggtggaaacccataacgaaatctatgacaaatttaaacagtccacccacagcatttacatgtttttcaacacgtcagaacttcgggaggccgtgccagagcctgttctgctgagtcgcgcggagcttcgattgctcagactcaagctcaaagtcgagcagcatgtggagctgtaccagaagtacagcaacaatagttggcggtacctctccaatcgattgctggccccaagcgactctcctgaatggctcagttttgacgtgactggtgtggtgcgccagtggctgagtcgcggcggcgagattgagggattccgattaagcgctcattgttcgtgcgatagccgagacaatactctgcaagtggacatcaacggttttactactgggcgcagaggagatttggctaccattcacggtatgaatcgcccgttcctactgctcatggccaccccgttggagcgtgcgcagcatctgcagagttcacgccatcgaagagccctggacacaaactactgcttctccagtaccgagaaaaactgctgcgttcgtcaactgtatatagattttagaaaggatctgggctggaagtggatccatgaacctaagggatatcacgccaacttctgtctgggcccatgcccttacatctggagtctggacacccagtacagcaaagtgctcgcgctttacaatcagcacaatcccggcgcctctgctgccccatgctgtgtgccccaggcgctggagcctctccccattgtctattatgtcgggaggaagccaaaggtggagcagttgagtaatatgatcgtcagaagttgcaagtgctcc

SEQ ID NO: 534 - DNA, 1170 bp, Artificial Sequence
  Description of Artificial Sequence: Synthetic Transcript Sequence
atgcccccttccgggctcagactgctgcctctgcttttgcctcttctgtggcttctggtccttaccccaggcagacctgcagcgggactttcgacttgtaagaccatagatatggagctggtgaaacgcaagagaatcgaagcaatcaggggtcaaattctgagcaaacttcgtcttgcatcgccccctagccagggcgaagttcctcctggacctctccccgaagccgtgctggccctgtacaattcgaccagagatcgcgtcgccggcgagtcggcagaaccagagcctgaacctgaagcggactattacgcaaaagaggtgactagagtcctcatggtggaaacccacaatgagatctacgacaagtttaagcaaagcactcactcaatttacatgttctttaacaccagcgaacttcgggaagcagtgccagaaccagtgctgctgtcccgcgcagaacttcggttgcttcggctcaagctcaaggtggaacagcatgtggaattgtaccagaagtactccaacaatagctggcgatatctgtccaatcggctgctggcaccgtcggactcgccagaatggctgtccttcgatgtgactggtgtcgtccggcaatggttgtccagaggtggcgaaatcgagggttttcgactctcagcacattgctcctgtgattcccgcgacaacactcttcaagtggatatcaacggctttaccaccggacgacgaggtgatctggccactattcatgggatgaacaggccttttctgcttctgatggcaactccgctggagcgtgcacagcatcttcagagctccagacatagacgcgctctggatactaactactgtttttcaagcaccgaaaagaactgttgtgtgagacaattgtacattgattttcgcaaagatctcggctggaagtggattcacgaacccaagggataccatgcaaacttttgccttggtccttgtccctacatctggagcctcgatacccagtactccaaggtcctcgccctgtacaaccagcacaatcctggcgcttccgcagcaccttgctgcgtcccacaagcacttgaaccgcttccaattgtgtactatgtggggagaaagcctaaagtggaacagctgagcaatatgatagtgcgcagctgtaagtgttcg

SEQ ID NO: 535 - DNA, 1170 bp, Artificial Sequence
  Description of Artificial Sequence: Synthetic Transcript Sequence
atgcctccatccggactgcgcttgctgccactcctgctgcctctcctttggctgcttgtgcttacccctggtcggccagcggccggcctttcgacttgcaagaccatagatatggaactcgtgaagcgtaagcgtattgaagcgatcagaggtcaaattctttccaaactgcgcctcgcaagccccccatcccagggcgaggtgccccctgggccacttccagaagcggtcctggccctgtataactcgacccgggatagggtcgcaggagaaagcgccgagcctgaaccggaacctgaagccgattactacgcaaaagaagtcacccgtgttctcatggtggaaacccataacgagatatatgacaaattcaagcagtcaactcattccatttacatgttctttaacacctcggaactcagagaggcagtgcccgagcctgtgcttctgtcgcgcgctgagctgcgcctcctgcggctgaaactcaaggtggaacagcatgttgaactctaccaaaagtactcgaacaatagctggagatacctttcgaaccgacttctggcaccctcggatagccccgagtggctttcctttgatgtgactggcgtggtgagacaatggctgtcccgaggcggtgaaatagaaggatttcggctgagcgcccactgcagctgcgactcaagagataatacccttcaagttgacattaacggctttactactggtcgaagaggagatctggcaactattcatgggatgaatagaccttttctgcttcttatggcaactcccctggagcgcgcacagcatctgcaaagctcacggcatagacgggctcttgacaccaattactgttttagctcaactgagaagaactgctgtgtgcgtcagctttacattgatttccgtaaggatcttggttggaagtggattcatgagcctaaaggataccacgcaaatttctgtctcgggccatgtccgtacatctggtcgctggatacgcaatattcaaaagtgctcgctctttacaatcaacataaccccggagcatccgccgcaccatgttgtgtgccccaggctttggaaccactgccaatagtttactacgtgggtcgaaagcccaaggttgaacagctgtctaacatgatcgtcagatcgtgtaagtgttca

SEQ ID NO: 536 - DNA, 1170 bp, Artificial Sequence
  Description of Artificial Sequence: Synthetic Transcript Sequence
atgccaccttcgggcctgcggctccttcctctgctgctccctctgctgtggctgctcgtgctgacgcccggacgtcctgcagcaggtctgtctacctgtaaaaccattgacatggaacttgtgaaaagaaagcgcatcgaggctatccgtgggcagattctgtccaagctgagattggcatcgccacccagccagggtgaggtgcctccaggcccactgccagaagcagtccttgcactttacaactcgacgcgcgatagagtggccggagaatcagcagaacctgagccagagccagaggctgactattatgcgaaggaggttaccagagtgctgatggtggaaactcacaacgaaatctacgacaagtttaagcaatcgactcactcgatctacatgttcttcaataccagcgaactgagggaggcagtgccggaacccgtgctcctgtctcgcgcagaactgcgcctgctgcgacttaagctgaaggtggagcaacacgtggaactgtaccaaaagtactcgaacaacagctggcgctacctgtctaacagacttttggccccatccgacagcccggaatggctttccttcgatgtcactggagtcgtgaggcagtggttgtcacggggaggcgagatcgaaggttttaggttgagcgcccattgctcctgcgattcgcgggacaacactcttcaagtcgacataaacggtttcactactggtcgcaggggcgaccttgcgactatacacgggatgaaccgtccgttccttctgcttatggcgacccctctggaaagagcgcaacatcttcagtcatcccggcacagacgcgcactcgacaccaactactgtttttccagcactgaaaagaactgttgcgtcaggcaactttacattgatttcaggaaggatcttggatggaaatggatccatgagcctaagggctaccacgcaaacttttgtttggggccatgcccgtatatctggtcgctggacacccagtactcgaaggtccttgccctgtataatcagcataatcctggggcgtccgccgccccgtgttgtgtgccacaagcccttgagcccctgcccatcgtgtactacgtgggtcgcaagcctaaagtggaacaactgtcaaacatgattgtcagatcctgtaagtgtagc

SEQ ID NO: 537 - DNA, 1170 bp, Artificial Sequence
  Description of Artificial Sequence: Synthetic Transcript Sequence
atgccgccgtcgggcctgcggctgcttcctctgctgctgccgctgttgtggctgctggtcctgacccccgggaggcccgcggccggactgtcgacgtgtaagacgatcgatatggagctggtgaaacgcaagcggatcgaggctatcaggggccagatcctttcgaaattgagacttgcctcgccgccgtcacagggcgaagtgccccctgggccgctgccggaggcagtgctggccctctacaactcgaccagggaccgggtcgccggcgagtcagcagagccggagccggaaccggaagccgactactacgccaaggaggtgaccagagtgctgatggtggagactcacaatgagatctacgataagtttaagcagtccactcattcaatctacatgtttttcaacacttccgagttgcgggaggctgtcccagaaccggtgctgctgagcagagctgaattgagactgttgcgcttgaaactgaaggtagaacaacacgtggaactgtaccagaagtattcaaacaattcatggcgatatctgtccaatcggctgctcgctccatcggattcgccagagtggctcagcttcgacgtgactggagtcgttcgccagtggctgtcgcggggcggtgaaatcgaaggtttcaggttgtccgctcactgttcgtgcgactcgcgggataataccctccaggtcgacatcaacgggttcactaccggacgccgcggggacctggctactattcacggcatgaaccgtcccttcctccttcttatggctactcccctggaaagggcccagcacctgcagagcagcagacatagacgcgccctcgataccaactactgtttttccagcaccgagaaaaactgctgtgtgagacagctgtacattgattttagaaaggatctcggctggaagtggatccacgagccaaaggggtatcatgcaaacttctgcctgggaccgtgtccatacatttggagcctcgacacccagtactcgaaggtcctggccttgtacaaccagcataatccgggagcttccgcggccccatgctgcgtgccgcaggcgctggaacctctgcctatcgtctactacgtgggacggaaaccgaaggtggaacagctgtcgaacatgatcgttcgctcctgtaagtgctcc

SEQ ID NO: 538 - DNA, 1170 bp, Artificial Sequence
  Description of Artificial Sequence: Synthetic Transcript Sequence
atgcctccttcaggactgcggttgttgccactgcttcttccactgctttggcttcttgtgctcacgcctggcaggcctgcagccggcctcagcacttgtaagactattgatatggaactcgtgaaacgcaagcgcattgaagcaatccggggtcaaatcctcagcaaactccgccttgcctccccaccatcccaaggagaggtgcctcctggacctcttcctgaagctgtgttggccctttacaactccacccgggatagagtggcaggtgaaagcgctgagccagaacctgaaccagaggcagattactatgctaaggaggttacgcgggtgcttatggtcgaaacccataatgaaatctatgataagttcaagcaaagtacccatagcatatacatgttctttaacacgtccgagcttagagaagccgtccccgaaccggtgctgctttcccgagcagaactcaggctcctccggctgaaacttaaggtggagcagcacgtcgaattgtaccaaaagtactcgaacaattcctggcggtacctttcgaatcggctcctggcaccatctgattccccagagtggctttccttcgacgtgactggcgtcgtcagacagtggctcagcagaggtggggaaattgaagggtttcgactctcagcacactgttcctgcgattcgagggacaatactctgcaagtcgacattaacgggtttacgactggtcgaagaggtgatttggcaactattcatggcatgaaccggccattcctgttgcttatggcaaccccactcgaaagagcccaacacctgcaatcctcgcgtcatagaagggcccttgataccaactactgcttctcgagtactgagaagaactgctgtgtgagacagctgtacattgattttagaaaggatctcggatggaagtggattcacgagcccaagggctaccatgccaacttttgtctcgggccttgtccttacatttggtcccttgacacccaatattccaaggtcctggccctctataaccagcataacccgggtgcgtcagcagcgccatgctgtgtgcctcaagcactcgaacctctgcctatcgtctactacgtcgggcgaaaacccaaggtggaacagttgtcgaacatgattgtgagatcctgcaaatgttcg

SEQ ID NO: 539 - DNA, 1170 bp, Artificial Sequence
  Description of Artificial Sequence: Synthetic Transcript Sequence
atgcccccttcgggcctccgcttgctgccactgctgttgccgcttctgtggcttctggtgttgactccggggaggccagccgctggcctcagcacttgcaagaccatcgacatggagctggtcaagcgaaagcggatcgaagccatccgcggacagattctttctaaactgcggttggcttccccacccagccaaggcgaggtgccgccgggcccgctgccggaagccgtcctcgccctttacaactccacccgagatcgagtcgcgggagaatcggccgaacccgaacctgaacctgaggccgactactacgcaaaggaggtgacgcgggtgctcatggtggagactcacaacgaaatctacgataagtttaagcagtcgacccattcaatctacatgtttttcaacacctccgagttgcgtgaagcggtccctgaaccagtgctgctctcccgtgcagagctgagactgctcaggctcaaactcaaagtcgaacagcatgttgaattgtaccagaaatactcgaacaactcctggcgctacctctcaaaccgccttctggcaccgtccgactccccagaatggctgtctttcgatgtcactggtgtggtgagacaatggctttcaaggggaggagaaatcgagggatttcgcctcagcgctcactgttcttgcgattcaagggacaacaccttgcaagtcgacatcaacgggttcaccacgggccggcggggagatctggcgactattcacggtatgaatcggccgttcctgctgctcatggcaactcccctcgaacgggcccaacacctgcagtcgtctcgtcaccgcagagcgctggacactaattactgcttctcatcaaccgagaagaactgctgcgtgcgccaactgtatatagacttccgcaaggacctgggatggaagtggatccatgagccaaagggttaccacgctaatttctgtcttggaccctgtccgtatatctggtcgctggacacccagtacagcaaagtgctcgccctgtacaatcagcataatcctggagcgtccgcggcaccttgctgtgtgccacaggcattggagcctctgccaatcgtttactacgtggggagaaagccgaaagtggaacagttgagcaacatgatcgtccgctcgtgcaagtgcagc

SEQ ID NO: 540 - DNA, 1170 bp, Artificial Sequence
  Description of Artificial Sequence: Synthetic Transcript Sequence
atgcccccgagcggacttcgcctgctgcctctgctgcttcctctgctctggttgctcgtccttaccccaggtagacctgcagccggtctttccacttgcaagactatcgatatggaactcgtgaagagaaagcgcattgaggccattagaggccaaattctctccaagttgcggcttgctagcccgccatcccaaggtgaggttccgccgggcccactgcccgaggcagtgcttgccctctataactcgacgcgcgatagggtcgctggagagtccgcggagcctgaaccggaacctgaggcggactattacgccaaggaggtgacccgagtgcttatggtggagactcacaatgaaatctatgataagtttaagcaaagcactcattcgatttacatgttctttaacacctcggaactccgggaagccgtgcctgaaccagtcctgctttcgagagccgagttgagactgctgcgcctgaaacttaaagtggaacaacatgtggaactgtaccagaagtacagcaacaactcctggcggtacctttccaatagactgcttgccccatccgacagccccgaatggctctcattcgatgtgaccggagttgtcagacagtggctgtcccggggaggagaaattgagggatttcggctgtccgcgcattgttcttgtgattcaagggataacaccctgcaggtggacattaacggttttacgaccgggagacgtggagatctcgcaactatccacgggatgaaccgcccttttctcctgctcatggccacccctctggaaagggcacagcacctccagagctcccggcacagacgggcactcgataccaattactgtttttcatccacggagaaaaactgctgcgtgaggcagttgtacatcgacttccggaaagatctcggatggaagtggattcatgagcctaagggctaccatgcaaacttttgcctgggaccatgcccatacatctggtcgcttgacactcaatatagcaaggtcctggcactgtataaccagcacaatccaggagcgtccgccgcaccctgttgtgtccctcaggccctggaacctctgcctattgtgtactacgtcggacgaaagccgaaagtggagcaactgtcaaatatgattgtgcgttcttgtaagtgtagc

SEQ ID NO: 541 - DNA, 1170 bp, Artificial Sequence
  Description of Artificial Sequence: Synthetic Transcript Sequence
atgcctcccagtgggttaaggcttttgcccctcctgctgccactcctgtggctgctggtgctcacacctggacggccggccgccggcctgtccacctgcaagacaatcgacatggaactggtcaagaggaaaaggatcgaagcgattcgaggccaaatcctcagcaaactgagactggcatcaccaccttctcagggagaagttcctcccgggcccctgcctgaagcagtgttagccctatacaactcaacgagggatcgtgtggccggcgaatcagccgagcctgagcccgagccagaagcggattactatgcaaaggaagtgacacgagtactgatggtggaaacacacaacgaaatctacgataagtttaaacaatcaacgcattcaatctacatgtttttcaacacgtccgagctgagagaggccgtgcctgaacccgtactgctctcccgtgcagagttgcggctgctgcggctaaagctgaaagttgaacagcacgttgagctgtatcagaagtacagcaataacagctggcggtatctaagcaataggctcctagcaccttccgacagccctgagtggctatcatttgacgttacgggagtagttcgccagtggctgagtagggggggcgagatcgaggggttccggctctcggctcactgctcatgtgattcgagagacaacaccctgcaggtggacattaatggatttacaaccgggcgtcgcggagatttggccacaatccatggcatgaatcggccttttctgctcctgatggccacccccctggagcgagcacagcatctgcagtctagtagacacagaagggccctcgatactaattactgtttctctagtacagagaagaactgctgcgttcgtcagctgtacattgactttcgcaaggatctggggtggaaatggatccacgaacccaaaggctaccacgccaatttttgcttaggaccatgcccttacatctggagcctggatacgcagtactctaaggtgctcgccctttacaaccaacacaatccaggagccagcgctgcaccttgttgtgtgccacaagcgctggagccactcccgattgtgtattatgttgggagaaaaccgaaggtcgagcaactgagcaatatgatcgtccgatcttgcaaatgctcc

SEQ ID NO: 542 - DNA, 1170 bp, Artificial Sequence
  Description of Artificial Sequence: Synthetic Transcript Sequence
atgcctccaagcggactccggctgttgcccctgctgttgccgctgctgtggctgctggtccttacccctggtcgcccagccgcaggcctgtcaacttgtaagaccatagacatggaactggtgaaaagaaagcgtattgaggcaataagaggccagattctctccaagctgaggcttgcatcgcctccgagccaaggagaagtgccccctggacccctgcctgaagccgtgctggcactgtacaactctacccgtgatagagtggcaggggagtcagcagaaccagagccagagcccgaagcggattactatgcaaaggaggtgaccagagttcttatggtcgaaactcataacgaaatctacgataagtttaagcagtcaacccatagcatttacatgttctttaacacttcagaactcagagaagcagtgccagagccggtgcttctctcgagggcagagcttaggctcctccgtctcaaactcaaggtggaacagcacgtcgaactctaccagaagtactcgaacaacagctggagatacctctccaatagacttcttgcaccttccgattcgccggaatggctgagctttgatgtaactggggtggtaaggcaatggctgtcacggggaggagaaatagagggatttcgcctctccgcccattgttcgtgcgacagcagagacaatacccttcaggtcgacattaacggattcactactgggagaaggggagatcttgcaaccatccacggtatgaaccggccatttcttcttctcatggccactccactcgaaagagctcagcacctccaatcctccagacatcgccgggcgctcgatacgaactactgctttagttcgaccgaaaagaactgttgcgtgcgccagctgtacatcgacttccggaaagatctgggctggaagtggattcacgagcctaaagggtaccatgcgaatttctgtcttggtccatgcccttacatttggagcctggacacccagtactcgaaggtgctcgccctgtacaaccagcataacccgggtgccagcgcagcgccatgttgtgtccctcaagcacttgaacctctgcctattgtctactacgtcggccggaaacctaaggtggaacaactttccaacatgattgtcagatcctgcaagtgttcc

SEQ ID NO: 543 - DNA, 1170 bp, Artificial Sequence
  Description of Artificial Sequence: Synthetic Transcript Sequence
atgccacccagtggcctccgactccttccgttgttgctcccactgttatggctcttagtgttaacaccaggtcggccggcggctggactgtccacctgcaagaccatcgatatggagctcgtgaaacgcaaacggatcgaagctattcgcggtcaaatcctgtcaaagttgcggcttgccagtccccctagccagggggaggtcccacctggtccactgccagaggcagttctcgctttgtataattctacacgggatcgggttgcaggggaatctgccgagccagagccggagccggaagccgactattacgcaaaggaggtgacccgagtgttgatggtggaaactcacaacgaaatatacgataagttcaaacaatctacccatagtatctatatgttttttaacacctctgaacttcgggaagccgtccccgagcctgtgctgctgtcgagagccgaactgcgtctgctcagactgaaactgaaggtggaacagcatgttgagttataccaaaaatatagtaacaactcttggcgctatttatcaaatagactcctggccccatcagactcaccagaatggctgagcttcgacgttactggcgtggtgaggcaatggctctcacgcggtggagagattgaagggtttcggctaagcgcccattgcagttgcgatagccgcgacaatacgctccaggtggacatcaacgggttcaccaccggacgcagaggggatctggccacaatccatggtatgaaccgcccatttctactcctgatggccacgccgttggaaagagcccaacacttgcagtccagtcgacatcgtcgagccctggacactaattattgtttttcttcgaccgaaaagaactgctgcgtccggcaactttacatagatttcaggaaagacctcggatggaaatggatccacgagcccaaaggatatcacgcgaatttctgcttagggccctgcccctatatatggtctttagatacccaatattccaaggtgctcgcactctacaatcaacataacccaggggcttcagctgcgccttgttgcgttccccaggccctggaacccctgccgattgtgtactacgtgggcagaaagccaaaggttgaacagctctctaacatgatcgtgcgctcttgcaaatgttcg

SEQ ID NO: 544 - DNA, 1170 bp, Artificial Sequence
  Description of Artificial Sequence: Synthetic Transcript Sequence
atgcccccgtcgggactgcgactgttgcccttgcttctgccgctgctgtggttgcttgtcctgacccccggtcggcctgcggccggcctgagtacctgcaagacaatcgatatggagctagtgaagcgtaaacggatcgaggccatccgtggccagatccttagtaagctgcgactggcgagtccaccgtctcagggcgaggtcccccccggacctttgccagaggcggtgctggcattgtacaacagcactagagacagagtcgctggagagtcggccgagccggaaccagagccggaggcagattactacgcgaaggaagtgactcgggtgctcatggttgaaacgcacaatgaaatctacgacaaattcaaacagtcgacgcacagcatctacatgttcttcaacacatccgaattgagggaagccgtacccgaaccggtgctgttgagccgagcggagttgcgtctgctgcgtctgaagctgaaggtggagcaacatgtagagctgtaccagaagtattcgaataactcgtggaggtatctaagtaatcggctgctggcaccctcggattcccctgagtggctgtccttcgacgtgacaggagtcgtgcggcaatggctctcgcgaggcggtgagatcgaaggttttagactctccgcccactgcagctgtgattcgcgcgataatactttgcaagtggatattaacggctttacgacaggcagacgaggtgatctggccacgattcatggaatgaatagacccttcctgttgctgatggcaacgccgctggaaagagcgcaacacctccagtccagcagacaccgacgcgcgctcgacaccaactactgtttctcttctaccgagaagaactgctgcgttcgtcagctttacatcgacttcagaaaggacctaggctggaaatggattcatgaacctaagggctaccatgctaatttttgcctaggaccatgcccttacatctggtcactagatactcagtactcgaaggtgttggcattgtacaatcaacacaatcccggagcgagcgccgcaccgtgctgcgtcccccaagcgctggagccattacccatcgtgtactatgtgggccgcaaaccgaaagtggagcaactgagcaatatgatagtacgctcctgcaagtgctcg

SEQ ID NO: 545 - DNA, 1170 bp, Artificial Sequence
  Description of Artificial Sequence: Synthetic Transcript Sequence
atgcctcctagcggactgcgcttacttccattacttctgcctctactgtggctgttagtgttaaccccaggtcgccctgccgccggccttagcacttgcaaaacgatcgacatggaattggttaagagaaagaggattgaggctatcagaggacaaatcctttcaaaattacgactggcatctcctccgagccaaggagaagtcccgcctggtcctctaccggaagctgttttggcactttataattctactagagatcgagttgcaggcgaatccgcagaacctgaaccggagccggaggctgattattatgctaaagaggttaccagggttttgatggttgaaacgcataacgaaatttacgacaagtttaaacagagcacccactcgatatatatgttcttcaatactagcgagctgagagaagctgtgccggaaccggtattactttctcgcgcagaactgcggctactgagattaaaacttaaggttgagcaacacgtagaattgtaccagaaatactcaaacaacagctggaggtacttgtccaacagacttttagctccgagcgactctccggaatggctttcattcgatgtcacaggagtagtgcgtcagtggttgtcccgcggcggagagattgaagggttcagactttctgctcattgcagctgtgactcacgtgataacaccctacaagtcgatatcaacggatttaccacaggacgccgcggtgatcttgcaacaattcacggaatgaacagaccctttttgctacttatggccacacctctggaacgcgctcaacacctccaatcatctagacatcgcagagcgttagacacaaattattgcttcagctctaccgaaaaaaactgttgcgttcgtcagctctacatcgattttcgtaaagatcttggctggaaatggattcatgaaccgaaaggatatcatgctaacttctgcttaggcccttgcccgtacatatggtcattggatactcagtactctaaagtccttgccctgtacaatcagcataaccctggtgcttctgccgcgccctgctgcgttcctcaggctctcgaaccactgcccatcgtctattatgtaggtcgcaaaccgaaggtcgagcaactcagcaatatgattgtccgctcatgtaagtgttct

SEQ ID NO: 546 - DNA, 1170 bp, Artificial Sequence
  Description of Artificial Sequence: Synthetic Transcript Sequence
atgcctccatccgggctgcggctgctgcctcttctcctaccattgttatggctcttggtgctgacaccgggacgccctgcagcaggtctgtccacatgtaagaccatagatatggagctggtaaagcggaaaaggattgaggctattaggggtcagatcttgtccaaactgcggttagcctctcccccttcgcagggagaggtcccacctggaccactgcctgaagcagttctggccctctacaattcgaccagagaccgggtcgcaggagagtccgccgaaccagagcctgaaccagaagcagactactatgccaaggaagtcaccagagtgctgatggtggagactcataatgagatctatgacaagttcaaacagtctacccacagcatctacatgttttttaatacaagcgagttgcgggaggccgttcctgagcccgtgctcctctctcgagctgaactacggctgttgaggctcaagctcaaggtcgagcaacacgtcgagctctatcagaagtacagtaataattcctggcgctacctcagtaatcgattactcgcaccaagtgactcccctgagtggcttagcttcgacgtgaccggggtggtgcgtcaatggttgagtagggggggagaaattgaaggattcaggctcagcgcccactgcagctgtgattccagagacaatactctgcaagtggacatcaacggctttaccaccggcaggagaggggatcttgccacaattcacgggatgaacaggcccttcctacttcttatggctactccattggagagggcccagcatttgcagagctcgaggcacaggcgagctcttgacacaaattactgttttagctccacagagaagaactgctgcgtgcgccagctttatattgatttcagaaaggatctcgggtggaagtggattcacgagcctaaagggtatcacgctaatttctgtttaggaccctgtccatacatctggtctctggatacccagtacagcaaagtgttggcgttgtacaatcaacataacccaggagcttcggcagcgccatgctgcgtgccacaggctctggagcctctccctattgtctactatgttgggaggaaaccgaaggtggagcagctgtctaatatgatagtgcggtcctgcaagtgttca

SEQ ID NO: 547 - DNA, 1170 bp, Artificial Sequence
  Description of Artificial Sequence: Synthetic Transcript Sequence
atgccaccaagcgggctgcggttactgccccttttactacccctactgtggttgcttgtcctgacccccggcaggcccgcagctggcctctccacatgcaaaacaatagatatggagctcgtaaaaagaaagcgtatcgaagcaatccgaggtcaaattttgtcaaaactgcggttggcctcccctccgagccagggcgaagtgccgcctggaccactgccagaagcggtcctggctttgtataattcaacccgcgaccgggtggctggagaaagtgctgagccagagccggaacctgaggcggactattacgccaaagaagttactagagttctgatggtggagacccacaacgaaatctacgacaaatttaagcaaagcactcacagtatatatatgttctttaatacaagtgagctgcgggaagccgtacctgaaccagtgctcctctccagagccgaactcaggcttctccggctcaaacttaaggtagaacagcacgtcgagctatatcaaaaatactccaataatagttggcgatacctgagtaaccgcctgcttgctccctcagattcccccgagtggttgtccttcgacgtcaccggagtggtgcgccagtggcttagccgggggggagaaattgaaggcttcagactgagcgcccactgcagctgcgatagccgcgataatacactgcaggtagatatcaacggctttactactgggcgaagaggggacttggccaccatccacggaatgaaccggccttttttactcttaatggctacaccactagagcgagctcagcaccttcaatcatcaaggcaccggcgggcgctcgatactaactactgtttctcgagcacggagaagaactgctgcgttagacagctgtacatcgactttcgaaaggatttgggttggaagtggatacatgaaccaaaaggctatcatgctaacttttgtctgggcccttgtccttacatttggtctctggacactcagtatagcaaagtgttagcactatacaaccaacacaacccgggggcttctgccgcaccttgttgcgtgccccaagcgctggagcctctccccatcgtgtactatgtcgggcgtaagccaaaagtggagcaattgtccaatatgatcgttcgaagttgcaaatgtagt

SEQ ID NO: 548 - DNA, 1170 bp, Artificial Sequence
  Description of Artificial Sequence: Synthetic Transcript Sequence
atgccaccaagtgggctacgcctactgccactcctcctcccactgctttggctgctggtactgacgccaggaaggcctgccgcaggtctgtccacttgtaaaaccatcgacatggagctggttaagcgcaaacgaatcgaggctattcgagggcagatactgtcaaaactgcggctggcttccccaccatcccagggtgaggttccccctgggccgctaccagaggccgtactggccctttataattcgactagagatcgcgtggctggagagagcgccgaaccagaaccggagcccgaggctgactactacgctaaggaagtgacccgcgtgttgatggtcgaaacccacaacgagatttacgataagtttaagcagtctacccacagcatatacatgttcttcaatacgagcgagctccgggaagcagtccctgaaccggtgctactctctcgggcggagttgaggctcctgcggctcaagctcaaggtggaacagcacgtcgaactttatcagaagtactcaaacaattcctggaggtacttgagtaaccgactcctcgcccctagtgattcccccgaatggctgtccttcgatgtgaccggcgtggtgcggcagtggctttctcgcggcggcgagatcgaagggttccggttgtctgcacattgctcatgcgactcccgagataacactctccaggtagacatcaacggctttactactggaagaagaggcgacctcgccaccatccatggcatgaacaggccatttctgctcctcatggccacccctcttgagagggctcagcacttgcagtcttcacgtcacagacgcgctttagacactaattactgtttctcatctacagagaaaaactgctgtgtacggcagctttatatcgatttcaggaaagatttggggtggaagtggattcatgagcctaaaggatatcatgccaacttttgtctgggaccgtgtccctacatctggtctctggatacacaatacagcaaggtcctggcactttacaaccaacataatcctggcgcaagcgctgctccatgctgcgtgccccaggcactggagcccctccccatagtctattatgttgggcgaaagccaaaagtcgaacagctgagtaacatgatcgttagatcatgtaagtgcagt

SEQ ID NO: 549 - DNA, 1170 bp, Artificial Sequence
  Description of Artificial Sequence: Synthetic Transcript Sequence
atgccgccaagtggactcaggttactgcctctcttactgcccctgctctggctgctggtactgacgccagggcgtccagccgctgggttgtctacctgcaaaaccatcgacatggaactcgttaaaaggaaacgcatcgaagccatcagggggcagatcctgtcaaagctgcgcctcgcaagtccacccagccagggcgaagtgcctccgggacctctgcccgaggcggtgctggctctctacaactctactagagatcgtgttgcaggcgagtcagcagagccagagcccgagcccgaagctgactattatgccaaggaggttactagggtgctgatggtggagacccacaacgaaatttacgacaagttcaagcaaagtacgcattccatttacatgttttttaacacctctgaactcagagaggctgtccctgagccagtgctgttgtctcgtgcagagctcaggctattgcggctcaagctgaaagtggagcagcatgtcgaactgtatcagaagtactccaacaattcttggagatacttatccaatcggctgttggctcctagcgactcacccgaatggctcagcttcgacgttaccggtgtggtgcgtcagtggctctccaggggtggagaaattgagggattccgcttgtccgcacactgctcctgcgactccagagacaatactctgcaggtggatatcaacggctttacgactggacgccgtggcgaccttgcgaccatccatggcatgaaccgaccatttctgctgctcatggcaacgccgctggagcgagcccagcaccttcagtctagtagacatcggcgcgcccttgatacaaattattgctttagcagtactgaaaagaattgttgtgtgaggcagctatacatcgacttccgaaaggacctgggctggaagtggatacatgagcctaaaggctaccatgccaatttctgtctgggcccttgtccatatatttggtccttggatacccagtattctaaagtgctggccctgtataatcaacataatcccggcgcttcagccgcgccatgttgcgtgcctcaggccttggaaccactcccaatcgtttattatgtgggccgaaaaccaaaagtagaacagctgtccaacatgatcgttcgctcctgcaagtgctct

SEQ ID NO: 550 - DNA, 1170 bp, Artificial Sequence
  Description of Artificial Sequence: Synthetic Transcript Sequence
atgcccccttccgggctaaggctcctgcctttgctccttcctcttctctggctcctagtgttgacaccaggaagacccgccgctggactttccacatgtaaaacaatcgacatggaactggttaaacggaaaagaatagaggcgatccgggggcagatactgtccaaactccgcctggcatctccaccatctcagggagaagtgccccccgggcctctacccgaagctgtcctcgcgctttataactccactagagatagagtcgctggagaatccgctgaacctgaacccgaaccagaagctgactattatgcgaaagaagttacaagagtgctcatggtggaaacacataacgagatatatgataaattcaagcagtcaacgcactcgatatacatgttttttaatacatctgaacttcgcgaagcggtacctgaacctgtgctactctctcgggctgaacttagattactgagactgaaactcaaagtggaacagcatgtggaactgtaccagaagtactcaaacaattcttggagatacctgtctaacagactactggctccgtccgattcaccagaatggttgagttttgatgtgactggagtcgtgcggcagtggctaagtcgagggggggaaatcgaagggtttaggcttagtgcccattgctcctgcgatagtcgagataacactctccaggtggatatcaacggattcacaacggggcgccggggggatctcgcaactatccacggaatgaatcggcccttcctgctcctgatggcaactcccctggaaagagcacagcatctacagtccagtaggcatcgacgcgctctcgatacaaactactgcttctcttctacagagaaaaattgctgtgttcgacagctttatattgattttcggaaagatctcgggtggaagtggattcatgaacctaaaggatatcacgctaacttctgccttgggccctgcccctacatatggtccttggatacacagtattctaaagtgctggctctatataaccagcataatcctggggcttcagccgctccatgttgtgttccccaggctctcgaaccccttccaatcgtctactatgttgggagaaaacctaaagtagaacaattaagtaacatgatagtaagatcctgcaaatgtagt

SEQ ID NO: 551 - DNA, 1170 bp, Artificial Sequence
  Description of Artificial Sequence: Synthetic Transcript Sequence
atgccgccgtcgggtttacgactattaccgttattattaccgttactatggttattagttctaacgccgggtcgaccggcggcgggtttatcgacgtgtaaaacgatagatatggaactagtaaaacgaaaacgaatagaagcgatacgaggtcaaatattatcgaaattacgtctagcgtcgccgccgtcgcaaggtgaagtaccgccgggtccgttaccggaagcggtactagcgctatataattcgacgcgagatcgagtagcgggtgaatcggcggaaccggaaccggaaccggaagcggattattatgcgaaagaagttacgcgtgtattaatggtagaaacgcataatgaaatatatgataaatttaaacaatcgacgcattcgatatatatgttttttaatacgtcggaattacgtgaagcggtaccggaaccggtattactatcgcgagcggaactacgtttactacgtctaaaattaaaagtagaacaacatgttgaactatatcaaaaatattcgaataattcgtggcgttatttatcgaatcgactattagcgccgtcggattcgccggaatggttatcgtttgatgtaacgggtgtagtacgtcaatggctatcgcgaggtggtgaaatagaaggttttcgactatcggcgcattgttcgtgtgattcgcgtgataatacgctacaagttgatataaatggttttacgacgggtcgtcgtggtgatctagcgacgatacatggtatgaatcgtccgtttttactactaatggcgacgccgctagaacgagcgcaacatttacaatcgtcgcgtcatcgacgtgcgctagatacgaattattgtttttcgtcgacggaaaaaaattgttgtgtacgacaattatatatagattttcgtaaagatttaggttggaaatggatacatgaaccgaaaggttatcatgcgaatttttgtctaggtccgtgtccgtatatatggtcgttagatacgcaatattcgaaagtattagcgttatataatcaacataatccgggtgcgtcggcggcgccgtgttgtgttccgcaagcgttagaaccgttaccgatagtttattatgttggtcgtaaaccgaaagtagaacaactatcgaatatgatagttcgttcgtgtaaatgttcg

SEQ ID NO: 552 - DNA, 1170 bp, Artificial Sequence
  Description of Artificial Sequence: Synthetic Transcript Sequence
atgccccccagcggtttgcgactgttaccattacttctgcccctgttgtggctgttggtcctaactcctggtagaccggcagcaggtctatcgacctgtaagactattgacatggaattggtaaaaaggaaaaggattgaggcgatccggggccaaatactgagtaaacttcgactggcatctccaccatctcagggcgaagtgccacctggtccactgcctgaggcggtgctggcattgtataatagcaccagagatcgagtggccggcgaatccgccgagccggagcccgagccagaagctgattattacgcaaaagaggtgacgcgtgtcctgatggtagaaacccacaacgaaatctacgacaagttcaaacaatccacccactccatctacatgtttttcaacacctcagaacttcgggaggccgtgcctgagcctgtgctgctatcaagagccgaattaaggttgctcaggctgaagcttaaggtcgaacaacacgttgaactgtaccagaagtacagcaataactcctggcgatacctgtcaaaccgactgttagccccctcagactccccagagtggctctcctttgacgtaactggggtggtgaggcagtggctgtccaggggcggtgagatcgaaggattccgattatccgctcattgttcatgcgactcaagggacaatacactgcaagtggatatcaatgggttcactacaggacgtagaggcgatctggccacgatacacggaatgaacagaccgtttctactattaatggccactccattggaaagggcccagcatctccaaagttctcgacaccggcgagcactggacaccaattactgttttagtagtacggagaaaaattgttgtgtacgacagctgtacatcgacttcagaaaggacttgggatggaaatggatccatgaaccaaagggctaccacgcaaatttctgcttagggccatgtccttacatctggtctctggacacccaatattctaaggttctggctctttacaatcaacacaaccccggcgccagcgcagctccgtgctgtgtgcctcaagcactggagccattgcctatagtgtactacgttgggcgtaagcccaaagtagaacagttatctaatatgattgtccgttcctgtaagtgtagc

SEQ ID NO: 553 - DNA, 1170 bp, Artificial Sequence
  Description of Artificial Sequence: Synthetic Transcript Sequence
atgccaccgtcgggtttgcgtttgctgccacttttgctgcctctcttgtggcttctcgtgctcacgcccggtcgccctgcggccggactttcgacgtgcaaaactatcgatatggaactggtaaaacgaaagagaatcgaggctattagaggccaaatcctttcgaaactgcgcttggcgtcaccaccttcgcagggagaagtgcctccggggccactccccgaggcagttctcgcactctacaactcgacgcgagatcgcgtggcaggcgaatccgctgaaccggaacccgagcctgaagcggattactacgccaaggaggtcactcgagtcctgatggtggaaactcataacgagatttacgacaagtttaagcagagcacccattccatatacatgtttttcaatacctcggaacttcgagaggccgtaccagaaccagtgctgctttcccgcgctgaacttagacttctgcgcctgaagctgaaagtggaacaacacgtcgagctgtatcaaaagtactcaaacaattcgtggcggtatctgagcaaccgtcttttggccccctcagactcccctgaatggctgtccttcgacgtgaccggagtcgtccggcagtggctgtcgcgaggaggagaaatcgaaggatttaggctgtccgcgcattgttcctgcgatagtagagataatactctgcaagtggacattaacggtttcaccaccggacggagaggcgatctggcaaccatacatggtatgaacaggccttttctgcttctgatggcaacgccgctcgaacgggcccaacatttgcaaagctccaggcatcgccgagcactcgatactaattactgtttttccagcactgagaagaattgctgtgttcggcagctctacattgactttagaaaggatctgggttggaaatggattcacgagcccaaagggtaccacgcaaacttctgcctgggaccatgtccttatatctggagtctggatacccagtactcaaaggtcctcgcactgtacaatcagcacaaccctggagcatcggccgcaccatgttgtgtgccccaggcactggaaccccttcctatcgtgtactacgtgggcagaaagccaaaagtggagcaactttcaaacatgattgtccggtcgtgtaagtgctcg

SEQ ID NO: 554 - DNA, 1170 bp, Artificial Sequence
  Description of Artificial Sequence: Synthetic Transcript Sequence
atgccaccctcaggcctgagattgctgcccttgcttttgccactcttgtggctgctggttcttacccccgggaggcctgcagcaggattgagcacctgcaaaactattgacatggaactggtgaaaagaaaaagaattgaggcaattcgcggccagatcctgagtaaacttcggttggcatcccccccttcacagggggaagttcccccaggacctcttcctgaagccgtgctggctctgtacaatagcactagagacagagtggccggcgagagcgctgaaccagaaccagagccggaggccgattactacgccaaagaggtaacacgcgtactgatggtggagacgcataacgagatttacgacaagttcaaacagagcacccactccatctacatgttcttcaacacaagtgaactccgagaagctgtcccagagcctgtgcttctgtctagagctgagctcaggcttctgcggcttaaactcaaggttgagcagcacgtggagttgtatcaaaagtattcaaataattcctggcgctatctcagcaatcgcctgctcgctcccagtgactcacccgagtggctgtccttcgacgtcactggagtggtccggcagtggctgagccggggtggggaaatcgagggcttcaggctgagcgcacactgctcatgtgactctcgcgataataccttgcaggtggacataaatgggttcacaacagggcgcaggggggatctggcaaccatccacggtatgaacagaccctttcttctccttatggcaactccgcttgaaagggctcagcacctgcagtcaagccgccacagacgcgccctcgataccaattattgcttctccagtactgagaaaaattgttgtgttcggcagttgtatattgattttcggaaagacctggggtggaagtggatccacgagccaaaaggctaccacgccaacttttgcctgggtccctgcccgtacatatggtccctggacactcaatattctaaagtcctggcactctacaaccagcacaaccccggagcttccgcagctccatgttgtgtgccccaggctctggaacccctgcccatcgtgtactacgtgggtcgaaaacctaaagtcgagcaactcagcaatatgatcgtgcggtcctgtaaatgctct

SEQ ID NO: 555 - DNA, 1170 bp, Artificial Sequence
  Description of Artificial Sequence: Synthetic Transcript Sequence
atgccgccgagcggactcaggctcttgccgctgctgctgcccctcctttggctgctggtgctcaccccaggacgccctgccgccggactgagcacctgcaagactattgacatggaactggtcaaaaggaagaggatcgaggcgatccggggacagatcctgagcaagctgcgcctggcttcgccgccatcacaaggagaagtgccgccaggaccactgccggaagctgtgctggcactgtacaacagcactagagatcgggtggcaggcgaaagcgcagaaccggaacctgagccggaagctgattactacgccaaagaagtgaccagagtgctgatggtggaaactcacaacgaaatctacgacaaattcaagcaatcgactcattcgatctacatgttcttcaatacctccgagctcagagaggcagtgcctgagccggtgctgctgtcaagagcggaactgcgcttgctgcggctgaagctgaaggttgaacaacatgtggagttgtaccaaaagtactccaacaacagctggaggtacctgtccaatcgcctcctcgcgccgtcagactcaccggaatggctctcgttcgacgtgactggagtggtgcgccagtggctgtcgcggggcggcgagatcgaaggcttcaggttgtcggcacactgttcatgtgattcgcgggacaacactctccaggttgacatcaatggattcaccacggggcgccgcggtgatttggcaaccatccacggtatgaacagaccattcttgttgctgatggctaccccgcttgagagggcgcaacacctccagtcgtcccgacatagacgggcacttgacaccaactactgcttctcaagcaccgagaagaattgttgcgtccggcagctctacatcgatttccggaaagatctgggatggaaatggatccatgaaccgaaggggtatcacgcaaatttctgcctgggaccgtgtccatacatctggtccctggacacccagtatagcaaagtgctggctctttacaatcagcataaccctggagcttccgctgccccttgctgcgtgccacaagcccttgaacctcttccgatcgtgtactacgtcggcaggaagccaaaagttgaacaactttcgaacatgatcgtgcggtcgtgcaagtgctcc

SEQ ID NO: 556 - DNA, 1170 bp, Artificial Sequence
  Description of Artificial Sequence: Synthetic Transcript Sequence
atgccgccgtccggcctgaggctgctgccgttgttgctgccgctgttgtggcttctcgtgcttaccccgggacggcccgcggcggggctgtcgacctgcaagacgatcgatatggagctggtgaagcgcaaaagaattgaagctattcggggacagatcctgtccaaacttcgactggccagcccgccgagccaaggagaggtccccccggggccgctgccggaagcggtactggccctgtacaattcaacccgcgatcgagtggccggagagagcgcagaaccggaacccgaaccggaggccgattactacgctaaagaagtcacccgcgtccttatggtcgaaactcacaatgagatatacgacaagttcaagcagtcaacccactcaatctacatgtttttcaacacttccgagttgcgcgaagccgtgccggaaccagtgctgctgtcgcgggccgaactcagactgctgcgcctgaagctgaaggtcgaacagcatgtggaactttaccagaagtacagcaataactcgtggcggtacctcagcaaccggctgctggccccttcggactccccagagtggcttagctttgatgtgactggagtggtgaggcagtggctgtccagaggaggggagattgaaggattccggctgtcggcccactgctcctgcgacagtagagacaatactctgcaagtggatatcaacggattcaccactggtcggcgcggggatcttgcaaccattcacggcatgaaccggccgtttctgctccttatggcaaccccgttggaaagggctcagcacctgcaatcgtcgcgacatcgcagagccttggatactaactactgcttctcatcgactgagaaaaactgctgtgtgcgccagctgtatatcgatttccggaaggacctcggatggaagtggatccatgaaccgaaaggataccatgcaaatttctgccttgggccgtgtccatacatctggtcactcgacactcagtactcaaaagttctcgcgctgtataatcagcacaacccgggagcgtcagcggccccgtgctgcgtcccacaagccctcgagcctctgccaatcgtttactacgtggggcgaaagcctaaagtggagcaactcagcaacatgatcgtgagatcctgcaagtgctcg

SEQ ID NO: 557 - DNA, 1170 bp, Artificial Sequence
  Description of Artificial Sequence: Synthetic Transcript Sequence
atgccacccagcggactgcgtctgttgcctcttctcctgccgctgctctggcttctggtccttactccaggccgtcctgcagcaggactgtccacctgtaagaccattgatatggagctggtgaagcgaaaacgtattgaagctattcgcggacagatcctgtcaaagctcaggctggcatccccgccatcccagggtgaagttcctccggggcccctgcccgaagcagtgcttgcactctacaactcaaccagggatcgagtggccggtgaatccgctgagcctgaacccgaacccgaggcggattactacgcaaaggaagtgacccgggtccttatggtcgagactcacaacgagatttacgataagttcaaacagtcaacgcactccatctacatgttctttaacacgagcgagctgagagaagccgtgccagaacctgtgcttctgtcccgcgccgagctgcggcttctgcggctgaagctcaaagtggaacaacacgtggaattgtaccagaagtacagcaacaattcatggcgatacctcagcaaccgccttctggctcctagcgattcgcctgaatggctgtcctttgatgtgaccggagttgtgcgtcaatggctgagccggggaggagaaattgaaggttttcggctgtccgcgcattgttcgtgtgattcacgcgataataccctccaggtggatatcaacggtttcactaccggacggcggggcgatcttgcaactattcacggaatgaacaggccttttcttctcttgatggcaactccacttgaaagggcgcaacacctgcagtcctcgcgccatagacgggcactggataccaattactgtttttcgtccaccgaaaagaactgttgtgtgcgtcagctgtacattgatttcaggaaagaccttggctggaagtggatccacgagcctaagggctaccatgcaaacttctgtcttggtccatgtccctacatctggtcccttgacactcagtactcaaaggtgctggcactgtacaatcagcataatcctggcgcaagcgcagcgccatgctgcgtgcctcaagccctggagccgctccctatcgtgtactacgtcgggcgcaagcctaaagtcgagcagttgtcgaatatgatcgtgcgctcgtgcaagtgtagc

SEQ ID NO: 558 - DNA, 1170 bp, Artificial Sequence
  Description of Artificial Sequence: Synthetic Transcript Sequence
atgcccccaagtggactgaggctgctcccgttgctcctgcctctgctgtggctgctggtactcacacccggccgcccagcagccgggctttcaacatgtaagacaatagatatggaactggtgaaaagaaagcgcatagaagccattcgcgggcagatactttcaaagcttcggctggccagtcctccatcccagggagaggtcccccctggacctctgccagaggctgtgctggcgctgtacaactctactagggatcgggtcgccggagagtccgcggaacccgagccagagccagaggccgattactacgcaaaagaggtgacccgggtgttaatggttgagacacacaacgagatttacgacaaatttaagcagagcacccattcaatttacatgttttttaatacctctgaactaagggaggcggtgccagagcccgtgctgctgtctagggccgagctacggttgctgcggctcaagctcaaggtggaacagcacgtcgagctgtatcaaaaatatagcaacaattcatggcggtacttgagtaataggctgttagcaccgtccgactcccccgagtggctgagcttcgatgtcaccggagtggtgcgccaatggttgtccagagggggtgaaatcgaaggattcagactgtcagcccactgttcatgcgatagccgtgataataccctccaggtcgacataaatggcttcaccacaggcaggcgcggggatcttgcgactatccatgggatgaaccgaccctttttgctgttaatggcaactccactggagcgagcccagcatcttcagtcctcacggcacaggcgggctcttgacacaaattactgcttcagctctacggaaaagaattgctgcgtgagacaattgtacatcgattttcgtaaggacctcggctggaaatggatccatgagcctaaggggtatcatgccaacttttgcttgggtccatgtccgtacatttggtcactggacactcagtactctaaagtactggcactctacaaccaacacaatcctggcgccagcgccgccccctgctgcgtcccccaagccctggaacccctgccaatagtttactatgtgggacgcaaaccaaaagttgagcagctgtccaacatgattgtcaggtcctgcaagtgcagc

SEQ ID NO: 559 - DNA, 1170 bp, Artificial Sequence
  Description of Artificial Sequence: Synthetic Transcript Sequence
atgccaccatccggcttgcgcctgctgcctctgcttcttcctctgctctggctattagtgctgacaccaggacgtcccgccgccggtctgagcacctgtaaaacgattgatatggagctcgtgaaaaggaaacgtattgaagccattcgtggacagatcttgtcaaagctgaggctagcgagcccacctagtcagggggaggtgcctccgggtcctttgcccgaggccgtgctcgccctgtacaactcaacccgcgaccgtgttgctggggaaagcgcagagcccgagcccgagcccgaggccgactactatgctaaggaggtgactcgagtactgatggtcgagacacacaacgagatctatgacaaatttaagcagagcacacatagtatttatatgttcttcaacacttccgagctgagggaagccgtgccagagccggtgctgctgagtagagcggagctgcgactactgagattgaagctcaaagtcgaacagcacgtagagttgtatcagaagtacagtaataattcgtggcggtatctgagcaatcgcttgctagctccttcagattcacccgagtggttatcatttgatgtgaccggtgttgtacggcagtggctgagccgaggcggggaaatagagggattccgcttatctgctcattgctcctgtgatagtagggacaatacccttcaggtcgatataaatggatttactacagggcgccgcggcgacctggccactatccacggaatgaaccgtcctttcctgctgctgatggctaccccactagagagggcacagcatttgcagagtagccgccaccgacgagccctcgacactaactactgtttcagttctactgagaagaattgctgtgtgagacagttgtatatcgatttcaggaaggacctggggtggaaatggattcacgaaccaaagggataccacgctaacttctgtctggggccatgcccctacatttggagcctcgatacccagtacagcaaggttctagctctgtataaccagcataatccaggagccagtgccgctccatgctgtgtgccacaagctttagagcccctgcccatagtgtactatgtggggcggaaaccaaaagtggagcagctgagcaacatgatcgtgcgctcttgcaaatgcagt

SEQ ID NO: 560 - DNA, 1170 bp, Artificial Sequence
  Description of Artificial Sequence: Synthetic Transcript Sequence
atgccaccaagcgggctgcggcttcttccacttctgcttccgctcctgtggctgcttgtgcttactccaggacgtcccgcggccggcctttccacctgcaaaactattgatatggagcttgtgaagcgcaaaagaattgaagcaattagaggtcagatcctgtccaaacttaggctggcatccccaccaagccaaggggaagtgcctcccgggcctctgcctgaagcagtgctggcgctgtacaactccaccagagatcgagtcgcaggagagagcgccgaacctgagcctgaaccggaggctgactactacgctaaggaagtcaccagagtgctgatggtggagactcacaatgagatttacgacaaattcaaacaaagcacgcactccatttacatgttcttcaacacctcggaactgcgggaggccgtgccagagcccgtcctgctgtcaagggcggaactgaggctgctgcgactgaagctgaaggtagaacagcacgtcgagctttaccagaaatactcaaacaactcatggcgatacctctccaatcgcctcctggcaccatcagattcgcctgaatggctttcatttgatgtcactggagttgtgagacagtggctctcaaggggcggagaaattgagggttttagactttcggcgcattgttcgtgtgattccagagataatactcttcaagtggatatcaatggtttcaccactggacggcgcggtgaccttgccaccatccatggaatgaacagaccttttctccttcttatggcaactcctcttgagagagcacaacatctgcaaagcagccgacaccggcgcgcgctggataccaactattgtttctcatcaactgaaaagaactgctgcgtccgacagctttacattgattttcggaaggatctgggatggaagtggatccatgagccaaagggctaccatgcgaacttctgcctcggaccttgtccatacatttggagcctcgatacgcagtactctaaggtcctggccttgtataaccaacataatcctggggcgtccgccgcgccttgctgtgtgcctcaagccctggagccgctgcctatcgtgtactacgtcggaagaaagccaaaggtggaacaattgtcaaacatgatagtgcggtcctgtaagtgttcg

SEQ ID NO: 561 - DNA, 1170 bp, Artificial Sequence
  Description of Artificial Sequence: Synthetic Transcript Sequence
atgccaccaagtggacttcgcctgctaccacttttactgccgctcctttggttattggttcttacaccaggacgcccagcggctggattgtcaacttgcaaaacgatagacatggaacttgttaaaagaaagcgaattgaagctatacgtggacaaattctatcgaaacttcgcctcgcatctccaccatcccaaggcgaagtgccaccaggaccgctcccagaagcagttcttgcgctctacaactcgacacgggaccgagtggctggggaatctgctgagccggaaccggagcctgaggctgactattatgcaaaggaggtgactcgtgtattgatggttgagacacacaatgagatttacgataaattcaagcaatcaacgcacagcatctacatgttttttaatacatcagagttgcgtgaagctgtgccggagccggttttgctgtcgagagctgaactcagactgttgcgtttaaaacttaaggttgagcaacatgttgagttgtaccaaaaatattcgaataattcttggagatacttgtctaatcgattgctggctccatcagatagcccagagtggctgtctttcgacgtgaccggagttgttcgtcagtggctttcaagaggaggagaaatcgaaggattccgtttgtcggctcactgctcatgtgattctcgagataacactttgcaggttgatatcaatggtttcactaccggcagacgcggagatcttgctacaattcatggaatgaatcgtccattcctccttcttatggcaacgcctttggagcgggctcaacacttgcaatcctcacgtcacagaagagctttggatacaaattactgtttttcgagtacggagaaaaattgctgtgttcgacagttgtacatcgattttcgtaaagatcttggatggaaatggattcatgaaccaaagggttaccatgcgaatttctgccttgggccctgcccttacatttggagtcttgatactcaatacagtaaagtccttgcgctttataaccagcataacccaggagctagtgcggccccatgttgtgtaccacaggccttggaaccactcccgattgtatactatgtgggacgaaagccaaaagttgaacaactgtcaaatatgattgttcgaagttgtaaatgttcc

SEQ ID NO: 562 - DNA, 1170 bp, Artificial Sequence
  Description of Artificial Sequence: Synthetic Transcript Sequence
atgccaccttcgggtctgagactgctgcccctcctcctcccgctgctttggttgctggtgctcacccccgggcgtcctgctgctggattgtcgacttgtaagaccatcgatatggaactggtcaagagaaaacgcattgaggcaatccgcggtcagatcctttctaagctgagactggcgtccccaccatcgcagggtgaggtgcccccgggacccttgccggaggccgtgctcgcgctctacaactccacgagagatcgggtggccggagagtcggctgaaccagaaccagagccagaagccgactactacgccaaagaggtcacccgtgtgctcatggtcgagacgcataacgaaatctacgacaagtttaaacagtcgacccattcgatttacatgttcttcaacacctcggaactgcgggaggccgttccggagccagttctgctgtcgcgggccgagctgcggttgctccggctgaagttgaaggtggagcaacacgtggagctgtaccaaaagtactccaacaattcctggcggtacctgtcgaacaggctgctcgcaccatcggattcccctgagtggctgtccttcgatgtgactggcgtcgtgagacagtggctcagcagaggaggagaaatcgaggggtttcgactgtcggctcattgttcttgcgattcccgggacaacacgttgcaagtcgacatcaatggatttactactggccggaggggggacctcgccacgattcacggcatgaacagacccttcctcctgctcatggcaactccgctggagcgcgcgcagcatcttcaatcatcccgccaccggcgggcacttgacactaactactgcttctcatccactgaaaagaactgctgcgtgcggcaactttacatcgacttcaggaaagaccttggatggaagtggatccacgaaccaaagggctaccatgcaaacttttgtctgggcccctgtccgtacatctggtccctggacacccagtactcaaaagttctggcgctctacaatcagcacaatccgggagcgagcgctgcgccatgctgcgtgccacaggctctcgaaccgctcccgatcgtgtactacgtcggacggaagcctaaagtcgaacagttgtcaaatatgattgtgcgctcctgtaaatgttct

SEQ ID NO: 563 - DNA, 1170 bp, Artificial Sequence
  Description of Artificial Sequence: Synthetic Transcript Sequence
atgcccccgtccggactgcgcctgctgccgctgcttcttccactgttgtggctcctggtgctcactccaggccggcccgccgctggcctctcgacttgcaagaccatcgatatggagttggtgaagagaaagaggatcgaggctatcaggggtcagatcctttccaaactgcgacttgcttcgccgccttctcaaggggaggtcccgcccggcccgctccccgaggccgtcctcgctctttacaatagcactcgggatcgggtggccggagaatcagcggaacctgaacctgaaccagaagccgactactacgcgaaggaggttactcgcgttctcatggtggaaacgcacaatgagatatacgacaaattcaagcagtcaacccattcaatctacatgttcttcaacacttccgaactgagggaggccgtgccggagccggtccttctttcacgcgccgaacttcgcttgctgagactcaaactgaaagtggaacaacatgtggaactgtaccagaaatactccaacaactcgtggcgctatctgtcaaaccgcctcctggccccgtcggatagcccggaatggctgtcatttgatgtgaccggggtcgtcagacaatggctctcgagagggggcgaaatcgagggattcagactgagcgctcattgctcgtgtgacagccgcgacaacacgctgcaggtggacatcaacgggttcaccactggcagacgcggcgatctggcaaccatccacgggatgaatcgccctttcctcctcctgatggcgacgccacttgagagagcgcaacacctgcaatcgtcaagacaccgccgagcactcgatacgaactactgctttagcagcaccgaaaagaattgctgcgtgcgccagttgtacatcgactttcggaaggatttgggatggaagtggatccacgaaccgaagggttaccacgcgaacttctgtctgggaccatgcccatatatctggtcgctcgacactcaatactccaaggtgctggccttgtacaaccagcataacccgggagcctccgcggcaccgtgctgcgttccccaagccctggaaccattgcctattgtgtattacgtcggccggaagccgaaggtcgagcagctgtccaatatgatcgttagatcttgtaaatgttcc

SEQ ID NO: 564 - DNA, 1170 bp, Artificial Sequence
  Description of Artificial Sequence: Synthetic Transcript Sequence
atgccaccttcagggttgaggctgttgccgctgttacttcctcttctctggctgcttgtactaactcctgggcggcctgccgccgggctaagtacctgcaaaaccatcgacatggaactggtcaagcgcaagaggatcgaagcgattcgaggtcaaatactcagtaagctacgactcgcctctccacctagccagggagaggtgcctccggggccacttcccgaggccgtgctggccttgtataactcaacccgcgatagggtggcgggcgagtccgcagagccagagcctgagcccgaggccgattactacgcgaaagaggtgacaagggtcctgatggtcgaaacccacaatgaaatctacgataaattcaagcagagcactcattctatttatatgtttttcaacacctcagagttgagggaggcagtgcctgagccggttcttctgagccgggctgagctgaggctcctgcgtttgaagctgaaagtagagcagcacgtggagctgtatcagaagtacagtaataactcatggaggtatttgagtaatcgtctgttggcccccagtgattcccctgagtggctgtctttcgatgttacaggagtggtgaggcagtggctgtcccgtggcggcgagatcgaaggctttcgactgtccgctcattgttcctgcgatagcagagacaacacactgcaggtggacatcaatggctttacaactgggcgcaggggcgacctcgccacaattcacggaatgaaccgacccttcctactgctgatggccacacctctggaacgagctcaacacctccagagctctaggcacaggagagcgctcgataccaactattgtttcagctccaccgaaaaaaactgctgcgtccgccagctttacatcgacttccgcaaggacctgggctggaagtggattcatgaacccaagggttaccacgcgaacttctgtcttggcccatgcccctatatctggagcctcgatacacagtatagcaaagttctggctttgtataatcagcataaccctggtgcttcagccgccccctgctgtgtaccacaggctttggagcccctgccaatagtgtactatgttgggcgaaagcccaaagtggaacaactttcaaacatgattgtgaggagttgtaaatgttcg

SEQ ID NO: 565 - DNA, 1170 bp, Artificial Sequence
  Description of Artificial Sequence: Synthetic Transcript Sequence
atgcccccatctgggctacgcctgttacccctgctgctgcctctgctctggctgttggttctcacccccggtaggcctgctgccggtctctctacctgtaaaacgattgatatggagctggtgaagcggaaaaggatagaagccatccgcggacagatcctgagcaaactgaggttggcctctcctcctagtcagggggaggtgccccctggtccccttcctgaagcagtgctggctctgtataactcgacaagagatagagtcgcaggggagtccgcggagccagagccagagcctgaagctgactattacgccaaggaggtgaccagggtgctgatggtggagacacacaatgaaatatacgacaagtttaagcaatctacccacagtatctacatgttcttcaacacgtcagagctgcgagaagcagtgccagagcccgtcctcctgtcccgggccgaactgaggctcttgcggctgaagcttaaggtagagcagcacgtggagttgtaccagaaatacagtaacaactcttggcggtacctgtcaaatagactgctcgccccctctgactcgcccgaatggctcagttttgacgtgaccggagtagtgcgtcagtggctatcccgaggaggagaaattgagggcttcagactgagtgcccactgcagctgtgacagccgtgataatacgttacaggtggatatcaatggctttactaccggacgccggggggacctcgcaaccatccatggcatgaatagacccttcctgcttctcatggcgacacccctcgagcgtgcccagcacttgcaaagctcacggcacagacgcgcccttgacacaaattactgcttttcatctacggagaagaactgctgtgtgcggcagctgtacatagatttcaggaaggacttgggctggaaatggatccacgaaccaaagggatatcatgctaatttctgcctgggtccctgcccgtacatctggagcctggacacccagtatagcaaagttttggcactctacaatcagcacaaccctggagcgtccgctgcgccatgttgcgttccgcaggcactggagcctctccccattgtgtactacgtgggcaggaagccgaaggtggaacagcttagtaatatgatcgtacgctcatgcaagtgctca

SEQ ID NO: 566 - DNA, 1170 bp, Artificial Sequence
  Description of Artificial Sequence: Synthetic Transcript Sequence
atgccaccttcggggctgcgcctcttgccacttctcctgccgctcctttggcttttggtgttgactccaggtagaccggccgcgggactctcaacctgcaagacgatcgatatggagctggttaaacgcaagcgaatcgaggcaatccggggacagatcctctccaaacttaggctggcctcgccaccgagccagggagaggtgcctccgggaccgctgccggaggcggtgctggcgctgtacaactcaacccgggatcgcgtggccggcgagagcgcggagcctgaaccggaaccggaagcggactactacgcgaaggaagtgacccgcgtcctgatggtggaaacccataacgaaatctacgacaaattcaagcaatccacccacagcatctacatgttcttcaatacctcggagctgcgcgaagcagtgccggagcctgtgctgctctcccgcgcggaactcagactgctgagactgaagctcaaagtcgagcaacacgtggaactgtaccagaagtactctaacaactcctggcggtacctttccaaccggctcctcgcaccgtccgattcaccggaatggttgtcgtttgacgtcaccggtgtggtcagacagtggctgtcacggggaggcgaaatcgaaggcttccggctttcggctcattgctcatgcgattcacgcgacaataccctgcaggtggacatcaacggattcacgaccggtcggcggggcgacctggcgacgatccacggaatgaatagaccgttcctgctgttgatggctacccctctggagcgggcccagcacctgcaaagcagcagacacagacgggccctcgacactaactactgtttctcaagcaccgaaaagaactgttgcgtgagacaactgtacatcgacttcaggaaggacctgggatggaagtggatccacgaacccaaggggtaccacgccaatttctgcctgggaccatgcccatacatctggtcactggacactcagtacagcaaagtgctggccctgtacaatcaacacaacccaggagcttcggctgccccgtgctgtgtgccacaagccctggaacctctgccaatcgtgtactacgtgggaagaaagccaaaggtggagcaattgtccaacatgatcgttaggtcgtgcaagtgcagt

SEQ ID NO: 567 - DNA, 1170 bp, Artificial Sequence
  Description of Artificial Sequence: Synthetic Transcript Sequence
atgcccccaagcgggcttcgcctgctgccccttctcctgcctctcctgtggctgctggtgctgactccgggcaggcctgcagccgggctctccacttgcaagaccattgatatggagctcgttaagaggaaacgcatcgaggctatccgagggcaaatcctgagcaagttgcgattagcttctcccccttcacaaggggaagtgcctccaggccccctgcctgaggcagtacttgccctgtataattcaacgcgggatagggtcgcgggcgagagtgctgagccggaacccgagccagaagctgattattacgcaaaggaagtaaccagggtattgatggtggaaactcataatgagatttacgacaagtttaagcaaagtacacatagcatctacatgtttttcaatactagcgagctacgggaggctgtcccagagcctgtgctgcttagtagggccgagcttaggcttttacgcctgaagctgaaggtcgaacaacacgtggagctgtatcagaaatatagcaacaactcttggcgctatcttagcaaccggctcctggccccctcagattctcccgagtggctgtcgtttgacgtaactggagtcgtcaggcagtggctgtccaggggaggagaaatagagggcttcaggctttctgcacactgctcttgtgactcccgcgacaacacactccaggtcgacattaatggcttcaccacagggaggaggggcgatctggcgacaatacatggcatgaaccgcccctttctcttgctgatggctacacctttagagcgagcacagcatttacagagctctagacataggagagctctagataccaattactgtttttcgtctaccgaaaagaattgctgcgttcggcagctctatatagatttcagaaaagacttgggttggaaatggattcacgaacccaagggctaccacgccaacttctgcctcgggccctgtccgtacatttggtctctcgatacacagtactctaaggtgctcgccctatacaatcagcacaatcccggagccagcgcggctccatgctgcgtgccacaggctctggagcccctgcccattgtctactacgtgggacgaaagccaaaggtggaacagctgagcaatatgattgtgaggtcttgtaagtgctct

SEQ ID NO: 568 - DNA, 1170 bp, Artificial Sequence
  Description of Artificial Sequence: Synthetic Transcript Sequence
atgccaccctccggtctgaggctgcttccgttgctgctgccactgctctggctcctggtgcttacccccggacggcccgccgctggactgtcaacctgtaagactattgacatggagttggtgaagagaaaaagaattgaagctatacgaggacaaatcttgtcgaaattaagactggcctccccgccttctcagggagaagtccctcctggacctctcccagaggccgtgctggccctgtacaactctactagagatcgcgtggctggggagtctgctgagcctgaacctgagcctgaagctgattattacgctaaggaggtcactagggtgctcatggtcgaaacccacaatgaaatctacgacaagttcaagcagtccacccacagtatctatatgttcttcaacacatccgagttgcgcgaggccgtgccagagcctgtcttgctgtcgcgggcagaattgcggctgctcagactaaagttaaaagttgagcagcatgtggaactgtaccaaaagtactccaacaactcatggcgctacctctccaatcgcctgcttgccccctcagattcgcctgaatggctatcttttgacgtaaccggcgtggtgagacagtggctgagtagaggcggagagattgaagggttccgcctttccgcccactgttcctgcgactcacgcgataatactttacaggtggatatcaacgggttcaccaccgggagacggggggatctggcgaccatccatggcatgaatcgtccctttttgcttctgatggccacccctctggagcgggcccaacatctgcagtcctctagacacaggagagcacttgataccaactattgcttctcctccaccgagaagaattgttgcgtcagacagctgtatatcgacttccgtaaagatctagggtggaagtggattcatgagcctaagggctaccacgccaatttctgtttaggcccttgtccctatatctggtcactcgacacacagtatagtaaagttttggcactgtacaatcaacacaatccaggtgcctccgcagcaccctgctgcgtacctcaggccctggagcccctgcccatcgtatactatgtgggtaggaagcctaaagtggagcagctgagcaacatgattgtgagatcttgcaagtgcagc

SEQ ID NO: 569 - DNA, 1170 bp, Artificial Sequence
  Description of Artificial Sequence: Synthetic Transcript Sequence
atgccgccttctggcctaaggttgctgccgctcctgctgccactgctgtggttgttggtcctgacacctggccgtcctgcagcgggcctgtcaacatgcaaaaccattgacatggagctcgtgaaacgcaaacgcattgaggcgatcaggggccagatcttgagtaagctcaggctggccagccctccaagccagggagaagtgcccccagggccgctgcccgaagctgtgttggccctctacaactctactagagatcgagtggccggcgaatcggcagaaccagagccggaacccgaggccgattattacgcaaaggaagtcactagggtcctgatggttgagactcacaacgaaatatatgacaaattcaagcagagcactcacagtatctatatgttttttaatacttctgagctgcgcgaggcagtccctgagcccgtcttgttgtcccgagctgagctgagactcctaaggcttaaactgaaagtcgagcagcacgtcgagctctaccagaagtactcaaataacagctggcgctacctctccaaccgacttcttgcgccctccgattcgcctgaatggctgtcattcgacgttacgggtgtggtgcgccaatggctgagccgcggcggtgaaatcgagggctttaggctatctgcccactgctcttgtgattctcgtgacaatacactgcaggtggacataaacggattcactacaggacggagaggggacctcgcaaccatccacggtatgaataggcctttcctactgctgatggcgacccccctggagcgagctcagcacctccagtcgagccggcacaggagagcactcgacaccaattactgtttttcctctactgagaaaaactgctgtgtgcggcagctttacatcgatttcaggaaggacttaggttggaaatggatacacgaacctaagggctatcacgcaaacttctgtcttggcccatgtccatacatttggtccctggacacccagtattcaaaggttctggcactctataaccaacacaaccccggcgccagcgcagcaccttgctgtgttccacaggctctcgagccactgccaatcgtgtactacgtgggtaggaaacccaaagttgagcagctttccaacatgatcgttcgcagctgcaaatgttcc

SEQ ID NO: 570 - DNA, 1170 bp, Artificial Sequence
  Description of Artificial Sequence: Synthetic Transcript Sequence
atgccgccgtcgggactgcgcctgctcccacttctcttgccgctcctgtggctcctggtccttaccccaggccgcccggccgcaggtttgagcacgtgcaagactattgacatggaactggtgaagcgcaagagaatcgaggctatacgcggccaaatcttgagcaaactcagattggccagcccgccgtcccaaggcgaggtgccgccaggacctctgccggaagccgtcctggctttgtacaactcgacccgggatcgcgtcgcgggagagagcgctgagcctgaacctgaaccggaggcagactactacgcaaaggaagttactcgcgtcctgatggtcgagactcacaacgaaatctacgacaaattcaaacagtctacccattcgatctatatgtttttcaacaccagcgaactgcgcgaagcagttccggaacctgtgctcctgtcccgcgctgagctgcgccttctgagacttaagctgaaagtggaacaacatgtggagctctaccaaaagtactccaataactcttggcgctacctctccaatcggttgctggctccgtcggacagcccagaatggctgtcattcgacgtgactggcgttgtgcgccaatggttgtcacggggcggggagatcgaaggcttcaggctgtccgcacactgttcgtgcgactccagggacaacactctgcaggtggacatcaacggcttcacgactggacgccgcggtgatctggctactattcacggaatgaatcgcccgttcctcctgcttatggcaaccccactcgagcgcgcccagcacctgcagtcatcccgccaccggcgcgcgctggataccaactattgcttttcatccaccgagaagaattgctgcgtgcggcagctttacatcgacttccggaaggatctcggctggaagtggatccatgaaccgaagggatatcatgccaacttctgcctgggcccttgtccgtacatctggtcccttgatacccaatactcaaaagtgctggccttgtacaaccaacacaatccaggagccagcgccgccccgtgctgcgtaccgcaggcactggaacccctgcctatcgtgtactacgtgggacggaagccgaaggtggagcagctgtcgaacatgatcgtcagaagctgtaagtgctcc

SEQ ID NO: 571 - DNA, 1170 bp, Artificial Sequence
  Description of Artificial Sequence: Synthetic Transcript Sequence
atgcctccgtccggtttgcgtctgttgcccctgctacttcctctcctctggctgttagtcctgacccctgggaggcctgctgccgggctcagtacctgcaagacgatagatatggaattggtaaaacgcaagcgaatcgaggctattaggggtcagatcctctccaagttacgtctcgcatcacctcctagccaaggtgaggtgcctcctggcccattacccgaagctgtgctggcactctacaactctacgcgcgacagagttgccggtgaaagcgccgaaccagagccggagcccgaagccgactactatgcaaaagaggtgacacgcgttctcatggtcgagactcataacgaaatttacgataagtttaaacagtccacgcactcgatctatatgtttttcaatacctctgaacttagagaagctgttcctgaacccgtacttctctcgagggccgagctccgactcttgagacttaagcttaaggttgaacaacatgtcgagctctatcagaaatatagtaataattcctggcgctatctttctaataggctcttggcaccctcggatagccctgagtggctcagcttcgatgtgactggtgtcgttcgacagtggttgtctcggggaggagaaatcgaggggttccgtttgtcggcgcattgtagttgtgactcgcgagacaacactcttcaggtcgatatcaacggtttcacgacaggtcgtcggggtgatttagcgaccatacacggtatgaaccgtccctttttgctgctaatggcaacaccgttggaaagggcccagcacctgcagtcatctcgtcataggcgagccctagacactaattattgttttagctccacagagaagaattgctgcgtgaggcagttgtatatcgactttcggaaagatttaggttggaaatggatccatgagccaaaaggataccacgcaaacttctgcctcggtccatgcccgtatatatggagtcttgatacccagtacagcaaagtcttggcgttgtacaaccagcataaccctggcgcctccgcagctccatgttgtgttcctcaggccttggagccactgcccatcgtctattacgtcggtcgtaagccaaaggttgaacagctaagcaatatgatcgttcgctcttgcaagtgtagc

SEQ ID NO: 572 - DNA, 1170 bp, Artificial Sequence
  Description of Artificial Sequence: Synthetic Transcript Sequence
atgcctcctagtggattgcggctcttgcctcttttactccctctcttatggctgctggttctgacacccggacgccccgcagctggcttgtctacctgtaagactatcgatatggagctcgtgaaacgtaaacggattgaggccattaggggccaaattctgagtaaactgcgcctggcaagtccccctagccaaggtgaggtaccgcctggacctctgccagaggccgtcctggccttgtataattccacaagagaccgcgtggctggggagtccgctgaacctgagccagaacccgaggcggattattacgctaaggaggtgactagagtcctgatggttgaaacacacaacgagatctatgacaaatttaagcagtctacacacagcatatacatgttcttcaacacatcggagctccgggaagcagtgcccgaaccggtgctcttatcgagagcagagcttagactgcttaggttaaaactgaaagtggaacagcatgtagaactataccagaagtattcaaacaatagctggaggtaccttagtaaccggctccttgcacccagcgactccccagaatggctgagttttgacgtgacgggagtggttagacagtggctgtcacggggaggcgaaatcgaaggttttcggcttagcgcccactgctcctgcgacagccgcgacaacactctccaggttgacataaacggctttacaaccgggaggcggggagatctcgccaccatccatggcatgaaccggccatttctgttgttgatggcgacacctttagagcgggcccaacacctgcaatcctctcgacatagacgagcgcttgacacaaactactgtttttctagcacagaaaagaactgttgtgtgcgacagctgtacatcgacttcaggaaggaccttggctggaaatggattcatgaaccaaaaggatatcacgcaaacttctgtctaggtccctgcccctatatatggagccttgatacccagtacagcaaggtgctcgcactctacaatcaacataaccccggtgcttccgcagccccgtgctgcgtgccccaggctctggaacccctccctatcgtgtactatgtggggcggaagcccaaggttgagcagctgtcaaatatgatcgtcaggagttgtaagtgtagt

SEQ ID NO: 573 - DNA, 1170 bp, Artificial Sequence
  Description of Artificial Sequence: Synthetic Transcript Sequence
atgcctccatcgggtctgaggctgctaccacttctgttgcccctgttgtggttactggttcttaccccagggaggcccgctgcgggtttgtccacttgcaagaccatagacatggagcttgtgaaaagaaagcgcatcgaagccattagaggacagatcctgagtaaactccggctggcgtcacctccatctcaaggcgaggttccaccaggccccctaccagaagcggttttggctctttataatagcacgcgtgaccgagttgccggtgagtccgctgagcctgagccagaacccgaggctgactattacgcgaaggaagtgaccagggtcctgatggtggaaacccataacgaaatatacgacaaattcaagcagtcaacacattccatttacatgttttttaatacatccgaactccgggaagcagtccctgaacctgtgttattgagccgggcggagctgcgcttgttgcggctgaagctcaaggtagagcagcatgtcgagctgtatcagaagtattccaacaatagttggagatacttatcaaacagattgttggcaccgtcagacagccctgagtggctttccttcgacgttacgggcgtggttcggcagtggctgtcccgggggggagaaatcgaaggttttcgtctgagcgcccattgtagctgtgattccagggacaacaccttacaggtggacatcaacgggttcacaaccggtagaagaggcgacctcgccacgatccacgggatgaataggccatttctgttgttaatggcaactcccctcgagcgggctcagcacctgcagtcatctagacaccgaagagcactggacaccaactactgcttttcttcaacggaaaagaattgttgcgtccgccagttgtatattgatttccggaaggacctagggtggaagtggattcatgagccaaagggataccatgcgaacttttgcctcggcccctgtccctacatatggagcctcgacactcagtattcaaaggtgctcgccctctacaaccaacataatccgggcgccagtgccgccccttgttgtgtgcctcaggccctggagccactgccaatcgtgtactatgttggacgcaagcccaaagtggaacagctaagcaacatgattgtgcggtcttgcaaatgtagt

SEQ ID NO: 574 - DNA, 1170 bp, Artificial Sequence
  Description of Artificial Sequence: Synthetic Transcript Sequence
atgccaccttcaggccttcggcttctgccactgcttctaccactgctgtggctgttagtgctgacacctggacggcccgctgctggccttagcacatgtaaaaccatcgatatggaactggtgaaaagaaagcggattgaggcaattcgggggcaaattctcagcaaattacgattggcttctccgccttcacagggtgaagtgccaccaggcccgctccccgaggctgttttggcgctttacaactcaacaagagatagagttgcaggggaatctgcagaaccagagcctgaacctgaggccgactattatgccaaggaagtgactcgggtcttaatggttgagactcacaacgagatatacgataagttcaagcagtccacccatagtatttatatgttttttaatacatccgagctccgagaggcggtccctgagcccgtgctgctctcaagggcagaattgagactgcttcgcctgaagctgaaggtggagcaacacgttgagctttaccaaaaatatagcaacaatagctggcgctacctctctaatcgccttctcgcaccgtcggactcaccagaatggctctcatttgacgtcaccggagtcgtgagacagtggctgagccgggggggtgagattgagggattccgcctcagcgctcattgcagctgtgatagccgggacaacactctccaggtggacatcaacgggttcaccacagggcggcggggcgatctcgctacgatccacggcatgaatcgtcccttcctgttactgatggctactcccctcgaacgtgcacagcacttgcagagttcacgacacagaagggctctggacacaaactactgtttttcctccactgaaaaaaactgttgtgtaagacagctgtacatagacttccgaaaggacctgggttggaagtggattcacgaacctaagggttatcacgctaacttctgtctaggtccctgtccctatatttggtccctcgacacccaatattcaaaggtgctggctctctataatcaacacaaccctggggcatctgcagctccatgctgtgtcccccaggccctagaaccgctgccaatcgtatactacgttggcaggaagccaaaggtggaacagctctccaacatgattgtgaggtcgtgcaaatgttca

SEQ ID NO: 575 - DNA, 1170 bp, Artificial Sequence
  Description of Artificial Sequence: Synthetic Transcript Sequence
atgccaccatcaggcctgagattgctgcctcttctgctgccactgctgtggttgttggtgcttactcctgggaggcctgccgctggacttagcacctgcaagaccatcgatatggaattggttaagcgcaagaggatcgaggctatcaggggacagattctgtcaaagttgaggctggccagtcccccatcccagggcgaggttccgcccggccccctgccagaggccgtcctcgccctgtataactccacccgggatagggttgccggcgagtcagccgagcccgaacccgagccagaagcagactattacgccaaggaggtcacaagggtgctcatggtggaaacccataacgagatctacgataaattcaagcagtctacccacagtatttacatgttcttcaacaccagtgaactgagggaggctgttcctgagcccgtccttttgagccgcgccgagcttaggctgctgagactgaaactgaaagtggaacagcatgtggagctgtaccagaaatactctaataacagttggagatacctgtccaatcgactgctggcccccagcgactcacccgagtggctttcatttgatgtaactggcgtggtgcgccaatggctttccaggggcggggaaattgaggggttcagacttagtgcacactgcagctgtgattcccgcgataacaccctgcaagtggatatcaatggctttaccactggccggaggggggatctggcgacaattcatgggatgaacagaccattcctcttgctcatggccacacctttggagcgggctcaacacctgcagtcatcaaggcaccggagagccctcgatactaactattgtttctccagcaccgaaaagaactgctgtgtccgacagctgtatatcgactttaggaaggatctgggttggaaatggattcacgagcctaaaggctatcatgctaacttttgtctcgggccttgcccctacatctggagcctcgatacccagtattccaaagttcttgcgctctacaaccagcacaatccgggtgcctccgctgctccctgctgcgtgcctcaggccctggaacccctgccaatcgtgtactatgtcgggaggaagcccaaagtcgaacagctctccaatatgatcgtgagatcatgtaaatgttct

SEQ ID NO: 576 - DNA, 1170 bp, Artificial Sequence
  Description of Artificial Sequence: Synthetic Transcript Sequence
atgccaccttcggggctgaggctgctgcccctgctgctcccactcctctggctgcttgtgttgacgccgggcagacctgcagcaggactgtcgacttgcaagaccatcgatatggagctggttaagaggaagcgcatcgaggccattcggggtcagatcctgagcaaactcaggctggcctctccaccatcacagggagaggtgccgccggggccgttgccggaggcagtgctggcactttacaactcgacccgcgatcgggtggcgggagagtcggcggaaccagaacccgaacctgaggcagactactacgcaaaggaggtcacgcgggtgctgatggtcgaaacccacaatgagatctacgacaagttcaagcaaagtacccactcgatctacatgttcttcaatacttcagaacttagagaagctgttcccgagcctgtgctgctgagccgggccgaactgcggctcctgcgcctgaaattgaaggtcgagcaacacgtggaactgtaccagaagtattccaataactcctggcggtacctgagcaacagactccttgcaccctccgatagcccggagtggctgagctttgacgtcaccggggtggtccggcaatggttgagccgagggggagagatcgaaggattcagattgtcagctcactgttcgtgcgactccagggacaatactctgcaggtggatatcaacggctttacgaccgggcggcgaggagatctggcgaccattcacggtatgaatcgccctttcctcctgttgatggcaaccccactggagcgcgcccagcatctccaatcatcacgccatcgcagagcgttggataccaattactgtttctcctcgactgaaaagaactgttgcgtccgccaactctacatagactttcgcaaagacctcggttggaagtggatccacgagcctaaaggctaccatgccaacttctgcctgggaccttgcccatacatttggtccttggatactcaatactcaaaagtgctggccctctacaatcagcataatccgggggcctcggcagcaccatgttgcgtccctcaggcactcgaacccctgccgatcgtttactacgtgggccggaagccgaaggtcgaacagctgagcaacatgatagtgcgctcctgcaagtgttcc

SEQ ID NO: 577 - DNA, 1170 bp, Artificial Sequence
  Description of Artificial Sequence: Synthetic Transcript Sequence
atgccccctagcggcttgcgcctgttacctttgctgttacccttattgtggttgctggttcttacccctggtcgaccagccgctgggctttcaacttgtaaaacaattgatatggaattggtcaagagaaagcgtatcgaggctattaggggacaaattttgtcaaagctcaggcttgcttcacctccgtcccagggtgaggtccctcctggaccgttgcctgaagccgttctcgctctctataactccactcgagacagggttgccggagaatcagctgaacctgaaccagaaccggaagccgattattatgctaaggaagtgacccgcgtactcatggtggagacgcataatgagatctacgataagttcaaacagtcgactcacagcatatatatgttctttaacacctctgaactaagagaggccgttccagaaccggtcttgttaagtagagccgagttgcgtttgcttcgtttgaaacttaaagttgagcagcatgttgagctctatcaaaaatattctaataattcttggcgatatttgtctaaccgtctacttgctcctagcgattcacctgagtggctttcatttgacgttacgggcgtcgtgcgacagtggctttcaagaggaggcgaaatcgaaggttttagactttctgctcattgttcctgcgatagccgtgataacactcttcaggttgatattaatggctttacgactggccggcgaggagacttagctactattcatggaatgaaccgaccattcctgctccttatggcgactcccctggagagagctcaacatcttcagtcttccagacatcgacgtgcattggacactaattattgtttctcgagtaccgaaaaaaattgttgtgtcagacagttgtacatcgatttcagaaaggacttaggatggaagtggattcatgagcctaagggttatcatgcgaatttttgccttgggccttgtccttatatatggtcgctggatacccaatatagcaaagttttagctctatataatcagcataatccgggtgcctccgctgcgccatgttgtgtccctcaagctcttgaacctctcccaattgtatattacgttggtcgtaagcccaaggttgaacaattatctaacatgattgtaaggtcatgcaagtgctcg

SEQ ID NO: 578 - DNA, 1170 bp, Artificial Sequence
  Description of Artificial Sequence: Synthetic Transcript Sequence
atgccgccctcaggcctgcggctgctgccgctcctcctcccgctgctgtggctcctggtgctcactcctggccgtcccgccgcaggactgagcacttgcaagaccatcgacatggaactcgtgaagcgcaagcggatcgaagccatcaggggccaaatcctgagcaagctccgcctggcgtcgccaccgtcacagggtgaagtgccgccgggacctctgccagaggcggtgctggccctttacaactccactagagacagagtggccggggagtcggccgagcctgagcccgagccagaagcggattactatgcgaaggaggtgactagagtgctgatggtggagactcacaatgaaatctacgacaaattcaagcaatccacccattcaatctatatgttcttcaacacctctgaactgagggaagcagtgccggaaccagtgctgctctcccgagcagagctgcgccttctcaggctcaagctgaaagtggaacagcacgtggagctgtatcagaaatactcgaacaattcctggagatacctgtcgaatcggctcctcgcaccgtcggactccccggagtggctctcattcgacgtgactggagtagtccgccagtggctgtccagaggtggagaaatcgaaggcttcaggctgtcagcacattgctcgtgcgattcgcgcgacaacactttgcaagtggacatcaacggcttcaccaccggacggcgcggcgaccttgccaccatccacggaatgaaccggccgttcctcctgctgatggccactccgctcgaacgggcgcagcacttgcagagctcccgccatcgccgcgccctggataccaattactgttttagcagcaccgaaaagaactgctgcgtccggcaactgtacatcgacttccgcaaagacctgggttggaagtggatccacgaaccgaaaggataccacgccaatttctgtctcggaccctgcccatacatctggtccctcgacacgcagtactcgaaagtgttggcgctttacaatcagcataaccctggagcaagcgcagccccgtgctgcgtccctcaggccttggaaccgctcccaattgtgtactacgtcggcagaaagccaaaggtggagcagctgagcaacatgattgtgagatcatgtaaatgctcc

SEQ ID NO: 579 - DNA, 1170 bp, Artificial Sequence
  Description of Artificial Sequence: Synthetic Transcript Sequence
atgccgcctagcgggcttagactgctgcctcttctgcttcctcttctgtggctgctggttctgacgcctgggaggccagccgctggactctccacctgtaagaccattgatatggagctggtcaagcggaagcggatcgaggcgattagggggcaaattctttcgaagctgcgtctcgcctcgccaccctcccagggagaggtgccaccgggtcctctccctgaggcagttctggcactttacaacagcacccgagacagggtggcgggcgaatcggcggagcccgagccggagccagaagccgactactacgccaaagaagtgactcgcgtgcttatggtggaaacgcacaacgaaatctacgacaaattcaaacaatcgacccactcgatttacatgttctttaacaccagtgaattgagagaagccgtgcctgagcccgtgcttttgagtagagctgaacttcggctgctgagacttaagctgaaggtggagcaacatgtggaactttaccagaagtacagcaacaattcgtggaggtacctttccaataggttgcttgcaccatccgattcgcctgaatggctcagctttgatgtgaccggtgtggtacggcaatggcttagccgaggaggcgaaatcgagggattccggctgagcgctcattgctcatgcgacagcagggataacactttgcaagtggacataaacggcttcacgaccggacgaagaggtgatctggcaactatccacggtatgaatcggccgtttctgcttctgatggcaaccccactggagagagctcagcacctgcagagctctcgccatagaagggcccttgatactaactactgctttagcagcaccgaaaagaattgctgtgtgcgccaactctacatagactttcgcaaagatctcgggtggaaatggatacacgagccgaaaggctaccatgcgaatttctgccttggaccatgtccctacatttggtcacttgacactcagtactccaaggtcctcgcactctacaaccaacataatcctggagcgtccgcagccccctgctgtgttccacaggcacttgaaccacttccaatagtgtattatgtcgggcggaagcctaaggtggaacaactctccaatatgatcgtcagatcgtgtaagtgtagc

SEQ ID NO: 580 - DNA, 1170 bp, Artificial Sequence
  Description of Artificial Sequence: Synthetic Transcript Sequence
atgccgccatcgggacttagactgttgcctctgctgctgcctttgctgtggctcttggttcttactcctggacgcccagccgcaggtctgtccacctgtaagacgattgatatggaactggttaagcgcaagcgcattgaagcaatcagagggcagatattgtcgaaactgcggcttgcttcccctccgtcacagggtgaagtgcctcctggtcctctgccggaggcagtgcttgcactctacaactccaccagagatagagtggcaggagagtccgcagaaccagagcccgagcctgaagcagactactacgctaaggaggtgacgagagtgcttatggtggaaacgcataacgagatttacgataagtttaagcaaagcactcacagcatctacatgttctttaacacctcagaactgcgtgaagcagtgccagaacctgtgcttctgtcaagggcagaactcaggctgctgcgactgaagctcaaggttgagcaacacgtggagctgtaccaaaagtacagcaataactcatggaggtacctgtcgaaccggcttctggccccctcggatagccctgagtggctgtcgttcgacgtaactggagtggtgagacagtggctgagtagaggtggggaaatcgaagggtttcgcttgtccgcccattgcagctgtgatagcagggataacaccctgcaagtggacattaacgggtttactactggtcgacggggagatctggccaccattcatggaatgaatcgtcctttccttctgttgatggcaactccgttggagcgcgcccaacatctccagtcgtcaagacataggagagcactggacaccaactactgtttttcatcaaccgaaaagaattgttgtgtgcgccaactctatattgacttccgcaaagatcttgggtggaaatggattcacgaaccaaaaggataccatgctaacttttgccttggaccatgcccttacatctggtcccttgatacccagtatagtaaggtcctcgctttgtacaaccagcacaatcctggcgcttcggcggcaccatgctgtgtgcctcaagcactggagccccttcccattgtctactacgtcggtcgaaagccgaaagtggagcagctcagcaatatgattgtgcggtcctgtaagtgttcc

SEQ ID NO: 581 - DNA, 1170 bp, Artificial Sequence
  Description of Artificial Sequence: Synthetic Transcript Sequence
atgcccccctccggcctgcgactcctgcccctattgttgcctctgctgtggcttctcgtcctgacccccggtcggccggccgcgggcctctcgacctgcaagaccatcgacatggaacttgtcaagaggaaacgcatcgaggcgatcagaggacagatcttatccaaactcaggctcgcctcgcctccctctcagggtgaggtcccgccgggacctttgcccgaggccgtcctcgcgctttacaactctacaagggaccgtgtcgccggcgagtccgctgagccggaacctgagcccgaggctgactattatgctaaggaagtgacccgtgtgttgatggtggaaacccacaacgagatttacgacaagttcaagcagtcgacccacagtatctatatgttcttcaacacctcggagctgcgggaggcggtcccggagccggtcctattgtctcgtgctgagctgcgactgcttaggctcaagctgaaggtcgagcaacacgtcgagctgtaccaaaagtactccaacaattcgtggaggtatctgagtaaccgcctcctagcgccgagcgactcgcctgaatggctgtcgttcgacgtcaccggtgtcgtccgtcagtggctctcccgcgggggtgagatcgaaggtttccgtttgtctgctcactgcagttgcgactctcgggacaacacgctgcaggtcgatattaacggattcacgaccgggaggcgcggcgacctggcaactatccacggtatgaaccgccctttcctcctgctgatggccacaccgctcgaacgtgctcagcacttgcagtcctcccgtcataggcgggcgcttgatacgaactattgcttctcgtctaccgagaagaactgctgtgtgcgccagctctacatcgatttccgtaaagatctgggctggaagtggatccatgagcccaagggctatcacgcgaacttctgcctgggaccctgcccgtacatatggtccctcgacacccaatactcgaaggttctggccctttacaaccaacacaaccccggtgccagcgcggctccgtgttgcgtgccccaagcgttggagccactgccgatcgtctactatgtgggtcgtaagccgaaggtcgagcagttgtctaacatgatcgttcgctcgtgcaagtgctcc

SEQ ID NO: 582 - DNA, 1170 bp, Artificial Sequence
  Description of Artificial Sequence: Synthetic Transcript Sequence
atgccccctagcggactccgcctcctgcctttgctgctcccacttctgtggcttctcgtactgactccgggacgaccagccgccggactgtcgacttgcaagaccatcgacatggaactggtgaagagaaagcgcattgaggcaatccgcggtcaaatcctgagcaagttgaggctcgcttcacctccttcccagggggaggtgcccccaggaccacttccagaggcggttctggctttgtacaactcgactcgtgaccgcgtggcaggagaatccgcagaacctgaaccggaaccggaggcggattactatgccaaggaggtcactagggtgctgatggtggagacgcataacgaaatctacgacaagttcaagcaatcgactcactccatctacatgttctttaacacttccgagcttcgggaggcggtcccggaaccagtcttgctgtcccgcgctgaactgaggctgctccgtctgaagctgaaggtcgaacagcacgtggaactgtaccaaaagtactcaaataacagttggcgctacttgtcgaatcggctgctggcgcctagcgattcgcctgagtggctctcgttcgacgttaccggagtcgtacggcagtggctttcgaggggcggcgaaatcgagggattccggctgtcggcacactgttcctgcgattcccgggataacaccttgcaggtggacattaatggcttcaccacgggacgccggggagatttggcgacgatccatggaatgaatagaccgtttctgctgttgatggcaacccctctcgagcgggcccagcatctgcaatcgagcaggcaccgccgggccctggacacgaactactgcttttcctccaccgaaaagaactgctgcgtccggcagctctacatcgatttccgcaaggacctcggatggaaatggatacatgagccaaagggctaccacgccaacttctgcctgggaccttgcccgtacatttggtcactcgacacccagtattcaaaagtgctggcactgtacaaccagcacaatcccggtgccagcgcggcgccatgctgtgtgccacaggccctggaaccgttgccgatcgtctactacgtggggcgaaaaccgaaagtggaacaactctccaacatgatcgtgcggagctgcaaatgttca

SEQ ID NO: 583 - DNA, 1170 bp, Artificial Sequence
  Description of Artificial Sequence: Synthetic Transcript Sequence
atgccaccgtccggcttgagactgcttcccctgctgttgccgttgctgtggctgttggttctgaccccgggtagaccggctgcaggtctcagtacctgcaagactattgatatggagctcgtgaagcgcaagagaatcgaggctattagaggacagattctcagtaagctgcgccttgcctctccacccagtcagggcgaggtgccgcccggaccgctccctgaagcagtgcttgctctgtataattcaacgagagatcgcgtcgccggcgagtctgcggaacctgaaccggagcctgaggcggactactatgcgaaagaggtaacaagggttctgatggtagagacgcacaacgagatctacgacaaattcaagcagagtacacattccatttacatgtttttcaacacaagcgaactccgcgaggctgtgcctgaacctgtgctgctttcccgcgctgagctgaggttgctcaggttgaaactgaaggtagagcagcacgtggaactgtaccagaagtacagtaacaacagttggcgctatctgtccaataggctgctggctccttccgatagccccgaatggctgagtttcgatgtgaccggagttgtaaggcaatggctgtcaagaggaggagagattgaaggttttcgcctcagcgcccactgctcttgtgatagtagggataatacgcttcaagtagatattaatggctttaccactggtagaagaggtgacttggcaaccattcatggcatgaatagaccgttcctgctgttgatggccactcccctggaacgcgcacagcacctccaatcttccagacatagaagggctttggatactaactattgtttcagttccacggagaaaaactgttgtgttagacagttgtatatcgactttaggaaggaccttggctggaagtggattcatgaacccaagggctaccacgccaatttctgtctgggtccatgcccttatatctggtcccttgacacccagtattcaaaggtgttggctctgtataaccagcacaaccctggagcgtctgctgctccgtgttgcgttccccaagctctggagcctctccccattgtgtactatgtcggaaggaagccaaaagtggagcagctgtctaacatgatcgtccgctcctgcaagtgtagc

SEQ ID NO: 584 - DNA, 1170 bp, Artificial Sequence
  Description of Artificial Sequence: Synthetic Transcript Sequence
atgcccccttcgggtctgcgcctgctgccacttctcctgcctcttttgtggctgttggtgctcaccccaggcagaccagcggcgggcctttcgacctgtaagacgatagatatggaactggtcaagcggaaacgaatagaggccatcagggggcagattctctcaaagctgcgtctggcaagcccgccttcgcaaggtgaggtccctcctggacctctccctgaggccgtgctggcactttacaacagcacgcgcgacagagtggcaggggaatccgcagaacctgagcccgagcctgaggccgattactatgcaaaggaagtgacccgcgtgctcatggtggagactcataacgaaatctacgataagtttaagcaatccacccattccatttacatgtttttcaacacctccgagttgagagaggcagtgcctgaaccggtgctgctcagcagagcagagcttcgactccttcgtctgaaacttaaggttgagcagcatgttgaactctaccagaagtattccaacaattcatggcggtacctgtcgaatcggctcttggcgccttctgacagtcctgaatggttgtcgttcgatgtgacgggagtcgtgaggcagtggctctcacgaggcggtgagattgagggattccgcctgagcgcacattgctcgtgcgattcacgagataacaccctccaggtggatatcaatggttttaccaccggtagacggggggacctcgcaaccattcacggaatgaaccggccattcctgcttctgatggcaaccccgctggagcgagcacaacatctccaatcttcgagacacagaagagcccttgacacgaactactgcttttcctcgactgagaaaaactgttgcgtgcgtcaactctacattgattttaggaaggacctgggatggaagtggattcacgaacccaagggttaccatgctaatttctgtctcggaccatgtccttacatatggtccctggacacccagtactcgaaggtcctcgcactgtacaatcaacataatccaggagcatcagcagcgccatgttgcgtgccccaagccctcgagccgctgcctattgtgtactacgtcggcagaaaacctaaggtggaacaactgtcaaacatgattgtgagatcctgtaagtgctcg

SEQ ID NO: 585 - DNA, 1170 bp, Artificial Sequence
  Description of Artificial Sequence: Synthetic Transcript Sequence
atgccaccctctggattgaggctcctgcctcttctcctccccctactgtggctcctggtactgacccccggccgacctgccgcaggcctctccacatgcaagaccattgacatggagttggtgaaaagaaaacgaatcgaggcgattcgcggccagatcctgtcaaaactgcgactggcctcacctccctctcagggagaagtgccaccaggacctctgcccgaggccgtgctggctttgtataactctactcgagacagggttgcgggagagtccgctgaacccgagccagagccggaggccgattactatgctaaagaggttaccagagtcctgatggttgagactcacaacgagatctacgataagttcaaacagagtacccactctatatatatgttttttaataccagcgagctgcgagaggccgtaccggaacccgtcctattgagtcgcgcagagttgcggctcctgagattaaaacttaaagttgaacagcatgtcgagttgtaccagaaatactctaataatagctggcgatacctctctaataggttgctggcccccagtgattctcccgagtggttgagtttcgatgtaacgggagtggtccgtcaatggctctcacgtggaggtgagattgagggattccggctgtctgctcactgcagctgtgattcaagagataacaccttacaagtggacatcaatgggtttacaacgggccgtcgcggggacctagcaacaattcacggcatgaacagaccattccttctcctcatggctactccactggagcgagcacagcacctgcagtcttctcgccacaggcgggcccttgatacgaactattgtttttcgtccacagagaaaaattgctgtgtgcgccagctgtacatcgattttaggaaagatttgggatggaaatggatccacgaacccaaggggtaccacgccaacttttgcctcggaccctgcccctacatttggagccttgacactcaatactcgaaggtactcgctttatacaatcagcacaaccctggggcttctgctgccccctgctgcgtgccgcaggctctggagccactgcccattgtgtattacgtgggcagaaaaccgaaagtggaacagttgtctaatatgatcgtgcgaagctgcaaatgcagc

SEQ ID NO: 586 - DNA, 1170 bp, Artificial Sequence; identical to SEQ ID NO: 541
  Description of Artificial Sequence: Synthetic Transcript Sequence

SEQ ID NO: 587 - DNA, 1170 bp, Artificial Sequence
  Description of Artificial Sequence: Synthetic Transcript Sequence
atgccgccatcggggttgcgccttctcccactccttctgccgcttctgtggctccttgtgctgactccgggaaggcctgctgcgggactctcgacctgcaagaccatcgacatggagttggttaaaaggaagcgaatcgaagctatccgcggacagatcctctcgaagctcaggcttgcgtcgccgcctagtcaaggagaagtgccccccggaccgctgcctgaagctgtgctcgctttgtacaactcaacccgggaccgtgtggccggggaatcggcagaaccggaacccgaaccggaagccgactattacgcgaaggaagtgacgcgggtcctgatggtcgagactcataatgagatctatgataagttcaaacagtcgacccattcaatctacatgttcttcaacacttcagagctgcgcgaagccgtgccggaacctgttttgctctccagggccgagcttcggctgcttagactgaagctcaaagtcgaacaacacgtggagctttaccagaagtatagcaacaactcatggcggtacctgagcaataggctcctggcaccatcagattcccccgagtggctctcgtttgatgtcactggagtcgtgagacaatggttgtcaagaggaggagagatcgagggcttccgtctgagcgcgcattgctcctgtgacagccgcgacaatacccttcaggtggacatcaacgggtttaccacgggccggcgcggcgacctggccactattcacggaatgaacaggccgttcctgctgctgatggccacgccactggagagggctcagcacctccaatcctcccgccatagacgggccctggataccaattactgcttcagcagcaccgagaaaaactgttgcgtgcggcagctctacatagatttcagaaaggatctcggctggaagtggatccacgagcctaagggctaccacgcaaacttttgcctgggaccgtgcccgtacatttggtcgttggacactcagtactccaaagtgctggcgctttacaaccagcacaacccgggtgcatccgccgcgccatgttgcgtgcctcaagccttggagccacttccgattgtatactacgtgggtcgtaaacccaaggtcgaacagttgtcgaatatgatcgttcgaagctgcaagtgtagc

SEQ ID NO: 588 - DNA, 1170 bp, Artificial Sequence
  Description of Artificial Sequence: Synthetic Transcript Sequence
atgcccccctccggcctccgattgttacctctgttgctcccactgctttggctactagtgttgacgcctgggcgacccgctgcaggactgtccacttgcaagaccattgacatggagcttgtgaaaagaaaaagaatagaagctattagaggccagatcttgtccaaactcaggctggctagcccacctagtcagggcgaggttccacctgggcctctgcctgaggcagtgcttgccttgtacaacagcacccgtgaccgggtggcaggggaatctgccgagcccgagcccgagcctgaagctgactactatgctaaggaagtgacccgagtgctgatggtggagacacacaacgagatttacgacaaatttaagcagtcgactcactccatctatatgttcttcaatacctccgagcttagggaagccgtccccgaaccagtcttgctgtcacgcgctgagctgcggctgctaaggttaaagctgaaagtcgagcagcacgttgaactataccagaaatattccaacaactcgtggcggtacctttccaaccgcttactcgccccttctgattcacccgagtggctgagttttgacgtcactggagtagttcggcagtggttaagtcgggggggcgaaatcgagggcttcaggctgagtgcacactgtagttgtgacagcagagacaacactttacaggtcgatattaacggatttacaaccgggcgacgcggcgacctggccactatccacgggatgaataggccgttcctactgttgatggccaccccgctggaacgagcccagcacctccaatcctctagacatagacgcgccctggataccaattactgtttctcctcaacagagaagaattgctgcgtgcgtcagctctacatagattttcggaaggacctgggttggaagtggatccatgaaccgaagggataccatgctaacttctgtcttggcccatgcccttacatttggtcactggatacccagtacagcaaggtgctagcgttgtataatcagcataatcccggcgcgtctgccgcaccttgttgcgtacctcaagcactggaaccattgcctattgtctattacgtaggcagaaagccaaaggtagaacagctgtccaacatgatcgttcgttcttgtaagtgctcc

SEQ ID NO: 589 - DNA, 1170 bp, Artificial Sequence
  Description of Artificial Sequence: Synthetic Transcript Sequence
atgccccctagtggacttagactcctcccactcctcctgccacttctgtggcttctggttctgactcccggaaggcctgctgccggcctcagcacatgtaaaactatagacatggagctagtgaaaagaaaaaggatagaggcaatccggggacaaatcttgagtaaactgaggttagcttcgcctccgagccagggcgaagtccctccaggccctctgcccgaagcagtgttagccctgtataacagcaccagggatcgggtggcaggcgaaagtgccgagccagaaccagagcctgaagcagattactacgctaaggaagtgacacgggttcttatggtcgaaactcacaatgaaatctatgataagttcaaacaatcgacacactctatttatatgttttttaatacaagcgagctaagggaggccgtccccgagccggttctgctctccagagccgagctgcgcctcctcaggttgaagctgaaagtggagcagcacgtcgagctgtatcagaaatacagcaacaactcttggaggtaccttagcaacagattgttggctccaagcgactctcctgaatggcttagttttgatgttacaggggtggtgagacagtggctgagccgcggaggtgagatcgagggctttcgactgtccgcccattgcagttgtgattcccgcgacaatacacttcaggtggacataaacggctttacgactggaaggagaggagaccttgcgactatccatggaatgaatcgccccttcctgctgcttatggccacccctttggagagggcgcagcacttgcagtcgtcaaggcaccgacgagcgctggatacaaattattgcttttcttcaaccgagaagaactgctgcgtgaggcaactatacatcgattttaggaaggatttgggctggaagtggatacatgagcccaaaggctatcatgcaaacttctgcctggggccatgcccctatatctggtctcttgatactcagtatagcaaagtgctggctctgtataaccagcacaatcccggtgccagcgctgccccttgctgcgtgccacaggctctggagccattgcccatcgtgtactatgtcgggagaaagccaaaggtggaacaactgagcaacatgatagtgagatcgtgcaaatgtagt

SEQ ID NO: 590 - DNA, 1170 bp, Artificial Sequence
  Description of Artificial Sequence: Synthetic Transcript Sequence
atgcctccatcaggattacgacttttaccattattacttcctttattatggcttttagtattaacaccaggacgtccagcagctggattatcaacttgtaaaacaatagatatggaattagttaaaagaaaaagaattgaagctattagaggacaaattttatcaaaattaagacttgcttctccaccatcacaaggagaagttcctccaggaccacttccagaagctgtacttgctctttataattcaacacgtgatagagtcgcaggagaatcagcagaaccagaaccagaacctgaagctgattattatgcaaaagaagtaactagagttttgatggttgaaacacacaatgaaatctatgataaatttaaacaaagtacacattcaatttatatgttctttaatacatcagaattacgagaagcagttcctgagccagttttactttcaagagctgaattaagattattaagattaaaactaaaagtagaacaacatgttgaattatatcagaaatatagtaataattcatggagatatttatcaaatagattattggctccttctgactctccagaatggttgagttttgatgtaacaggtgttgtaagacaatggttaagtagaggtggtgaaattgaagggttcaggttatctgcacattgttcttgcgattctagagataatacattgcaagtcgatattaatggatttactacaggtcgacgtggtgatttagctacaatacatggaatgaatagaccttttcttcttcttatggctactccacttgaaagagctcaacacttacaatctagtagacatagacgtgcactagatactaattactgtttttcatctacagaaaaaaattgttgtgttcgacaactttacattgattttagaaaagatttgggttggaaatggattcatgaaccaaaaggatatcatgcaaatttttgtttgggaccatgtccttatatatggtcattagatacacaatattcaaaagttttagccttatataatcaacataatccaggagcttccgcagcaccttgttgtgttccacaagcattagaacctttgccaattgtatattatgttggaagaaagccaaaggttgagcaattatctaatatgattgtaagatcatgtaaatgttca

SEQ ID NO: 591 - DNA, 1170 bp, Artificial Sequence
  Description of Artificial Sequence: Synthetic Transcript Sequence
atgcccccatccgggctgcgactcctgcccttgctcctgcctttgttatggttgttagtgctgacgcccgggaggcccgcggcagggctctcgacctgtaagaccatagacatggagttagtcaagagaaagcgtattgaggctatccgggggcagattctgagcaagttgcgcctggcgtcccctcctagtcagggtgaggtgcctccaggccctttgcctgaggcagtgctggccctatacaacagcaccagagaccgcgttgccggggaatctgccgagccggagccggaacccgaagctgactactatgccaaggaggttacgagggtccttatggtggagacacataatgaaatttacgataaattcaagcagtctactcacagcatctatatgttttttaatacatcagaactgcgggaagcagtgcctgagcctgtgcttttgagtcgcgctgagctaaggctgttgcgcctgaaactcaaagtcgagcagcacgtcgagctgtaccagaagtacagcaataatagctggaggtacctgtctaacaggctgctcgccccctcggactccccggaatggctctcctttgatgtcacaggggtcgtacgacaatggctatctcgcggtggggaaatcgagggatttaggctctctgctcactgtagttgcgactctcgcgataatacgctacaagtcgacatcaacggtttcacgacaggccgcagaggggatctggctaccattcatggcatgaaccgaccttttcttctcctgatggccacccctctggagagggctcagcaccttcagtcgtccaggcacaggcgcgcccttgacaccaattactgcttttcctccactgagaaaaattgctgcgtgcggcaactgtacatcgattttcggaaagacctgggatggaagtggattcacgaacccaaaggctatcatgccaacttctgtctcggaccatgcccctacatttggagtctagacacgcagtactctaaagtacttgctctatacaaccagcacaaccccggtgcaagcgctgcgccctgctgtgtcccacaggctctggaaccattgcctatcgtgtactacgtgggtcggaaacctaaagtggaacaactgtccaatatgattgtcagaagctgtaaatgctca

SEQ ID NO: 592 - DNA, 1170 bp, Artificial Sequence
  Description of Artificial Sequence: Synthetic Transcript Sequence
atgccaccatctggattgcgtcttctccctctgctgcttccattgctctggcttctggtgttgacacccggaaggcccgccgctggtctctccacttgcaaaaccatcgatatggagctggttaagagaaagaggatagaggccatcagaggtcagatcttgagcaaattgcgtctcgcatcacctccttcccaaggtgaagtccctccaggccctctccctgaggcagtcctggctctttacaatagcacccgcgatagggtggccggagaaagtgcagagcccgaacccgaaccagaggctgattattatgctaaggaagtgacacgcgtccttatggtggaaacacataatgaaatatacgacaagtttaaacagagtacccacagcatctacatgttcttcaacacatccgaactgagagaggcagtacctgaaccagtgctcttgagtagggctgaactgaggctgctcagactgaagctgaaggtggagcagcacgtagaactctatcagaagtactcaaataattcttggagatacctcagtaatagactccttgcaccatccgattcaccagagtggttgtctttcgatgtcaccggtgtcgtcaggcagtggctctctcgtggtggagagatcgagggatttagactctccgcacactgctcatgcgattccagagacaatacccttcaggttgacattaacggcttcacaactggccgtcgcggcgacttggccactattcacggcatgaaccgtccttttctgttgctgatggcaaccccactggagcgtgcacagcacttgcagtcctctagacacagaagggcccttgatactaactactgtttcagttccaccgagaagaactgctgcgtgaggcagctctacattgacttccgcaaggacctgggttggaaatggattcatgaacccaaaggatatcatgctaatttctgtctgggtccatgcccctacatctggtccttggacacacaatatagcaaggtgctggcactttataaccagcacaatccaggcgcctcagccgccccatgctgtgtgcctcaggccctggagccactgcctattgtgtactatgtaggacgtaaacctaaggtcgagcagttgtctaacatgattgtgagatcatgcaagtgtagc

SEQ ID NO: 593 - DNA, 1170 bp, Artificial Sequence
  Description of Artificial Sequence: Synthetic Transcript Sequence
atgccaccatcaggcctccggctgcttccgctgctgctgccactcctgtggctgcttgtcctgacgccaggccggccagctgcggggttgtctacatgtaagaccattgacatggaactcgtgaaaagaaagcggattgaagccattaggggtcagatccttagcaagctgagactcgcttcccccccctcacaaggagaggttccccctgggcccctgcctgaagccgtgctggccttgtacaattccactagagacagggtggccggcgaaagtgccgagccggaaccagaacctgaagccgattactacgccaaggaggtgactagagtattgatggtggagacccacaatgaaatatatgacaagttcaagcagtctacacactcaatctacatgttcttcaacactagcgaactgagggaggccgtcccggaacccgtgttgctgtctcgagccgaactgcgcctcctgcggcttaaattgaaggtggagcaacatgtagagttgtaccagaagtattcaaataatagttggagatatctgtccaaccgtctgctagctcctagcgactctccggagtggctgtcattcgatgttaccggggtggtcaggcagtggctgtcccgaggaggcgaaatcgaagggtttaggctcagcgcacactgctcgtgtgactcaagggacaacactctgcaggtggacatcaatgggtttacaaccgggcgacggggggacctcgccacaatacacggcatgaataggcctttcctgttgctcatggcgacccccctggagcgcgcccaacatctgcaaagttcacggcatcgcagagcattagacaccaactactgtttttcttctacagagaaaaactgctgtgtacgccaactgtatatcgacttccgcaaggacctggggtggaagtggatccacgagcccaagggatatcacgccaatttctgtcttggcccttgtccatacatttggagcctggacactcagtattcgaaggtgctcgccctatacaaccagcacaaccccggggcctcggctgccccctgttgcgtcccacaggcgctcgagccactccctatcgtatactatgtaggacggaaacctaaggtggaacagttaagcaacatgattgttcgttcatgtaagtgtagc

SEQ ID NO: 594 - DNA, 1170 bp, Artificial Sequence
  Description of Artificial Sequence: Synthetic Transcript Sequence
atgcctcctagcggacttcggcttcttccgcttctgcttcccctcctttggctgcttgtgttgaccccaggacgcccagctgccgggctgtccacttgcaagaccattgatatggagttggtcaaaagaaagaggatagaagcaattagaggacagattcttagcaagttgaggttggcgtcccctccgtcccagggcgaggtgccacccggacctcttcccgaggcagtcctggcgttgtacaactcgacgagagatagagtggccggggaatccgccgaacccgaacctgaaccggaagcagattactacgccaaggaggtgaccagggtgctgatggtcgaaactcataacgagatttacgataagtttaaacagtcgactcattcaatttacatgttctttaacacctcggaactccgagaagctgttcctgaacctgtccttctttccagggcggaactccgcctgctgcgccttaagctgaaggtggaacaacatgtcgagctctaccagaaatactccaataactcgtggagatacctgagcaacaggctgctggcaccatcggactcgcctgagtggcttagcttcgatgtgactggagtggtgagacaatggctttcgagagggggagagattgaaggatttcgcctgagcgcacattgcagctgcgattcgagagacaatacgcttcaagtggacattaatggattcaccacgggtaggcgaggcgacttggcgactattcatggaatgaaccgcccctttctcctgctgatggcaactccactcgagcgagcacagcatcttcaatcgtcccggcacagaagggcactcgataccaactactgtttttcatccactgagaaaaactgttgtgtgcgccagctgtacattgatttcaggaaggacctcggttggaaatggattcacgagccaaagggttaccacgcaaacttttgtctcggaccctgcccttacatttggtcgctggatacccagtacagcaaggtgcttgcactttacaaccaacacaatccaggagcaagcgccgccccgtgttgtgtcccgcaagcgctggaaccactgccaatcgtgtactacgtgggacggaaacctaaagtggagcagctcagcaatatgatcgtgcggtcatgtaaatgctcc

SEQ ID NO: 595 - DNA, 1170 bp, Artificial Sequence
  Description of Artificial Sequence: Synthetic Transcript Sequence
atgccaccttcaggcctgcggctgcttcctttgctgcttcctcttctctggctccttgtgcttactccaggacggccagcagcaggcctgtccacctgcaaaaccattgatatggagcttgtgaagagaaaacgaattgaagcaataagaggacagatccttagcaagctgcggcttgcatcgccaccttcccagggtgaggtgcctccaggtccacttccagaagccgtcttggccttgtataacagcacccgtgatagagtggcaggggaatcggctgagccggaacccgaacctgaagcagactactacgcaaaggaggtgaccagagtgctcatggtcgaaacccacaacgaaatctacgataagttcaagcaatcaactcattcaatttacatgtttttcaacacttcggaacttagggaagcggtgcctgaaccagtcctgctctctcgggcggaactccgtctcctccgacttaagttgaaagttgagcagcacgtcgagctgtaccagaagtactccaacaactcgtggaggtacctctcgaaccgactgcttgctcctagcgactctccagagtggctttcgtttgatgtgactggagtcgtgcgacaatggctctcccggggaggggaaatagaaggctttagactgagcgctcactgttcgtgcgactcgcgcgataacactctgcaagtcgacataaacggttttaccaccggacgtcgcggtgatcttgcaaccattcatggaatgaaccgcccttttcttcttctcatggcgacccccctggagagagcacaacaccttcaatcgtccaggcataggagagcgctcgatacgaactactgcttcagtagcaccgagaagaactgttgcgttcggcagctttacatcgattttcgcaaggatctgggatggaagtggatccatgaaccgaaaggataccacgccaatttctgtctgggaccctgtccatacatttggagcctggatactcagtactccaaggtgcttgcactgtacaatcaacataatcctggagcctccgcagcaccatgttgcgtgccccaagcactcgagcccctccctattgtgtactacgtcggaagaaaacccaaggtggaacagctttccaacatgatagtgagatcctgcaagtgttcg

SEQ ID NO: 596 - DNA, 1170 bp, Artificial Sequence
  Description of Artificial Sequence: Synthetic Transcript Sequence
atgcccccctctggtcttaggctactgcctctgctacttcctctcctgtggttgctcgttctgactcccgggagacccgcagcggggctttccacatgcaagaccattgacatggagcttgtcaagcggaagcgcatcgaggcaatcaggggtcagatattgtcaaaactcagactggctagccctcctagccagggtgaggtccctcccggccccctgccagaagcggtgctggctctttataattctacccgagatagggttgccggggaatcagccgagcctgaaccagagcctgaagcagattactatgccaaagaggttacacgtgtactcatggtggaaactcacaacgaaatatatgacaagttcaaacagtctacacactccatttatatgtttttcaatacttctgaacttcgtgaggcagtgcctgaacccgtgctgctctccagagcggagctgcgtctgctgagactgaaattgaaggtggaacaacatgtcgagctgtatcagaagtacagcaacaacagttggagatacttgtccaatagactgctcgctccatccgacagccctgaatggctgtcttttgatgtcacaggagtggtgagacagtggctcagcagaggaggcgaaatcgaagggttccgtctttccgcccactgttcatgcgactctcgcgacaatacccttcaggtggacataaacgggttcactaccggaaggcggggcgatctcgcaaccattcacggcatgaacaggccgtttctcctcctgatggccacgcccctcgaaagagcacaacacctccaaagtagtagacacaggcgggcactcgatacgaactattgctttagctcaaccgagaagaactgttgtgtccggcagctttacatcgactttcggaaagacttagggtggaagtggattcacgaacccaagggctatcacgctaacttttgtcttggaccgtgtccctatatctggtctcttgacacgcagtacagcaaggttctcgcactgtacaaccagcacaaccccggcgcctctgctgctccatgctgcgttcctcaggcactcgagcctctgcctattgtctattacgttggtcgtaaacccaaggtcgagcagctctcaaatatgattgtgagatcctgtaagtgttcg

SEQ ID NO: 597 - DNA, 1170 bp, Artificial Sequence
  Description of Artificial Sequence: Synthetic Transcript Sequence
atgcccccatctggattaaggctgcttccactgttactcccacttttatggcttctcgtgctgacgccgggacgcccagctgctgggctctccacctgcaagactatcgacatggagctggtcaagaggaagcgcatcgaggccatccgagggcagatcctgagcaaactgagattagcttctccgccttcacaaggtgaggtgccccctgggccactcccagaagccgtgctcgcattatacaacagtacaagggatcgagtcgccggcgaatccgccgaacctgaacccgagccggaggccgattactatgcgaaagaggttactcgcgtactgatggtagagacacataatgagatatatgataagttcaagcaatccacccacagcatatacatgtttttcaatacaagcgaacttagggaagccgtgcccgagcccgttttgttgtctcgcgctgagcttcgactgctgcgcctgaagctaaaggttgagcagcatgtggaactgtaccagaagtactcaaacaatagctggcgctacctatcaaacaggctcctcgccccaagcgactctcctgaatggttaagctttgatgtgaccggtgtggtccgtcagtggctctctcgcggcggggaaatcgaagggtttagattaagtgcgcattgtagttgcgattccagggacaacacattgcaagtggacattaacgggtttactactgggagaaggggggacctggctactatccatggaatgaacaggccgtttctccttctgatggctacacccctggagcgtgcacagcatctacagagctcgcgccacagacgtgcccttgacacaaactattgtttcagtagcactgaaaaaaactgttgcgtgcgccagctatacattgattttaggaaggaccttggttggaaatggatccatgagccaaaaggctatcacgccaatttctgcctgggaccctgcccctacatctggagcctggatacccagtatagtaaggtgctggccttgtacaaccagcacaacccaggagcctctgcagcaccgtgctgcgtcccccaggcactagaacctctgcctattgtctattacgttggccgtaagccaaaagtggagcaactgtccaatatgatcgttaggtcatgtaagtgcagt

SEQ ID NO: 598 - DNA, 1170 bp, Artificial Sequence
  Description of Artificial Sequence: Synthetic Transcript Sequence
atgcccccctctgggcttaggctgctgccactgcttttgccacttctatggttgctggttctgactcccggccgacccgctgctggtctttcaacttgcaagactatcgatatggagcttgtaaagcgaaagcgaattgaagcgatccggggccaaatcctgagcaaactgcgcttagcgagccctccatcccagggcgaggtgccccccggacctctgcccgaagccgtgctggctctctataatagtacccgggaccgggtggctggtgaatccgctgagccggaaccagagccagaagccgactactatgctaaagaagtgacccgggtcctcatggtagagactcataacgaaatttacgacaagttcaagcagagtacccactccatttatatgttcttcaatacaagcgaactcagggaagctgtacccgagccagttctcctcagccgggctgagttgcgactgctccgccttaagttaaaggttgagcagcacgtggagctgtatcagaaatatagcaacaatagctggaggtatcttagcaacagattgctcgctccaagtgattcccctgagtggctgagcttcgacgtcacaggagtcgtgcgccagtggctgtcccgtgggggagaaatcgagggcttccgtctctcagcccattgtagttgcgatagccgagacaacaccttacaagtggatatcaatggctttaccactggtcgcaggggggatctggcgaccattcacggcatgaaccggccgttcctcctcttgatggctactcccctggaacgggcccagcatctccagagttccagacataggcgagcgcttgataccaactattgtttttcttccactgaaaaaaactgctgcgtgcgccaactctacattgattttaggaaggatctcggttggaagtggatccatgagccgaagggctatcacgccaacttttgtttggggccatgtccgtatatttggagtcttgacacccaatactcaaaggttctggcactttataatcagcataatcctggtgctagtgctgctccctgctgcgtgccccaggcccttgagcccctgcccattgtttattacgtcggcagaaagcccaaggtcgagcagctgagcaatatgatcgttcggagctgcaaatgcagc

SEQ ID NO: 599 - DNA, 18 bp, Artificial Sequence
  Description of Artificial Sequence: Syn5 Promoter DNA Sequence
attgggcacccgtaaggg

1. A method of inducing tolerance in a cell system to an antigen comprising contacting said cellular system with phosphatidylserine (PS) and a tolerogenic composition comprising the antigen, one or more polynucleotides.

2. A method of inducing Treg cell activity in a cellular system comprising contacting said system with phosphatidylserine (PS) and a tolerogenic composition comprising an antigen, one or more polynucleotides and phosphatidylserine (PS).

3. The method of claim 1 or 2, wherein the phosphatidylserine is co-administered with the tolerogenic composition.

4. The method of any of claims 1-3, wherein said one or more polynucleotides comprises a chemically modified mRNA, said chemically modified mRNA encoding an immunomodulatory polypeptide.

5. The method of claim 4, wherein said immunomodulatory polypeptide is an antibody.

6. The method of claim 4, wherein said immunomodulatory polypeptide is selected from the group consisting of an inhibitor of mTOR, IL-2, an anti-IL-2 complex, IL-10, TGF-β, IL-35, galectin-1, IL-23, IL-27, IL-35 and IL-37.

7. The method of claim 5, wherein said antibody is specifically reactive with a member selected from the group consisting of CD3, CD40, CD40 ligand, CD4, and CTLA-4.

8. The method of any of claims 3-7, wherein said mRNA comprises at least one region which is codon optimized.

9. The method of any of claims 1-8, wherein the tolerogenic composition is formulated in a lipid nanoparticle (LNP).

10. The method of claim 8, wherein the LNP comprises phosphatidylserine (PS).

11. The method of claim 9, wherein the formulated LNP composition is administered systemically.

12. A method of treating an autoimmune disease, inflammatory diseases, allograft transplant/graft vs. host disease (GVHD), diabetes or multiple sclerosis, comprising contacting a cell, tissue or organism with phosphatidylserine (PS) and a tolerogenic composition comprising an antigen and one or more polynucleotides encoding a tolerogenic polypeptide of interest.

13. The method of claim 12, wherein the autoimmune disease is lupus.

14. The method of claim 12, wherein the inflammatory disease is selected from the group consisting of colitis, Crohn's disease, allergic encephalitis.

15. The method of any of claims 12-14, wherein the tolerogenic composition is formulated in a lipid nanoparticle (LNP).

16. The method of claim 15, wherein the LNP comprises phosphatidylserine (PS).

17. The method of claim 15, wherein the formulated LNP composition is administered systemically.

18. The method of any of claims 12-14, wherein the phosphatidylserine is co-administered with the tolerogenic composition.

19. A method of treating a subject with an environmental hypersensitivity or allergic reaction to a protein or antigen comprising contacting said subject with a tolerogenic composition comprising the antigen and one or more polynucleotides.

20. The method of claim 19, wherein the subject is contacted using a micro-dosing regimen.

21. The method of claim 20, wherein the micro-dosing regimen occurs over a period of time selected from the group consisting of at least 1 hour, at least 2 hours, at least 3 hours, at least 4 hours, at least 5 hours, at least 6 hours, at least 7 hours, at least 8 hours, at least 9 hours, at least 10 hours, at least 11 hours, at least 12 hours, at least 13 hours, at least 14 hours, at least 15 hours, at least 16 hours, at least 17 hours, at least 18 hours, at least 19 hours, at least 20 hours, at least 21 hours, at least 22 hours, at least 23 hours, at least 1 day, at least 36 hours, at least 2 days, at least 3 days, at least 4 days, at least 5 days, at least 6 days, at least 1 week, at least 2 weeks, at least 3 weeks, at least 1 month, at least 2 months, at least 3 months, at least 4 months, at least 5 months, at least 6 months or more than 6 months.

22. The method of claim 21, wherein the dose of the amount of antigen and one or more polynucleotides in the tolerogenic composition increases during the micro-dosing regimen.

23. The method of claim 19, wherein the environmental hypersensitivity or allergic reaction is to a protein or antigen or other trigger selected from the group consisting of plants, grass, tree and other plant pollens, mammal, animal hair or dander, insect, insect parts, excreta or venom, helminthes, non-mammals, birds and reptiles, foods (e.g., legumes, nuts and fish), bacteria, fungi and molds, drugs, metals, wool and latex.
